(19) United States
(12) Patent Application Publication
(10) Pub. No.: US 2014/0315744 A1
(43) Pub. Date: Oct. 23, 2014

(54) ASSESSMENT OF OOCYTE COMPETENCE BY DETECTING SPSB2 AND/OR TP53I3 GENE EXPRESSION

(71) Applicant: Gema Diagnostics, Inc., Ann Arbor, MI (US)

(72) Inventors: Dagan Wells, Oxford (GB); Pasquale Patrizio, Guilford, CT (US)

(21) Appl. No.: 14/351,768

(22) PCT Filed: Oct. 15, 2012
(86) PCT No.: PCT/US12/60296

§ 371 Date: Apr. 14, 2014

Related U.S. Application Data
(60) Provisional application No. 61/581,187, filed on Dec. 29, 2011.
(60) Provisional application No. 61/547,379, filed on Oct. 14, 2011.

(51) Int. Cl. C12Q 1/68; G01N 33/569

(52) U.S. Cl. CPC C12Q 1/6881; G01N 33/56966; C12Q 2600/158
USPC 506/9; 506/16; 506/18; 435/6.12; 435/6.11; 435/7.92; 435/7.1

(57) ABSTRACT

Methods are provided for evaluating an oocyte for fertilization and implantation comprising analysis of gene expression in cumulus cells wherein the detected genes or polypeptides include at least SPSB2 and TP53I3. For example, methods are provided for determining whether a cumulus cell expresses, or does not express, one or more of a group of markers identified as differently expressed between cumulus cells associated with chromosomally normal oocytes and cumulus cells associated with chromosomally abnormal oocytes. Methods are provided for the detection of marker expression of differentially expressed genes at the RNA level, as well as at the protein level.

### RELATED APPLICATIONS

[0001] This PCT application claims priority to U.S. provisional Ser. No. 61/547,379 filed on Oct. 14, 2011, and U.S. provisional Ser. No. 61/581,187 filed on Dec. 29, 2011. The contents of both provisional applications are incorporated by reference in their entirety herein.

### BACKGROUND OF THE INVENTION

[0002] Currently, there is no reliable commercially available genetic or non-genetic procedure for identifying whether a oocytes that are “pregnancy competent”, i.e., oocytes which when fertilized by natural or artificial means are capable of giving rise to embryos that in turn are capable of yielding viable offspring when transferred to an appropriate uterine environment (e.g., oocytes that have a normal chromosome competent).

[0003] Perhaps in part of the lack of a means for identifying pregnancy competent oocytes, the success rate for assisted reproductive technology (ART), pregnancy and birth rates following in vitro fertilization (IVF) attempts remain low. Subjective morphological parameters are still a primary criterion to select healthy embryos used for in IVF and ICSI programs. However, such criteria do not truly predict the competence of an embryo. Many studies have shown that a combination of several different morphologic criteria leads to more accurate embryo selection. Morphological criteria for embryo selection are assessed on the day of transfer, and are principally based on early embryonic cleavage (25-27 h post insemination), the number and size of blastomeres on day two, day three, or day five, fragmentation percentage and the presence of multi-nucleation in the 4 or 8 cell stage (Fenwick et al., Hum Reprod, 17, 407-12. (2002).

[0004] As embryos that result in pregnancy differ in their metabolic profiles compared to embryos that do not, some studies are trying to identify a molecular signature that can be detected by non-invasive evaluation of the embryo culture medium (Brison et al., Hum Reprod, 19, 2319-24. (2004); Gardner et al., Fertil Steril, 76, 1175-80. (2001); Sakkas and Gardner, Curr Opin Obstet Gynecol, 17, 283-8 (2005); Seli et al., Fertil Steril, 88, 1350-7. (2007); Zhu et al. Fertil Steril. (2007). Currently, when a woman undergoes preimplantation genetic screening (PGS) in a fertility clinic, doctors are trying to select an oocyte or an embryo that is healthy (e.g., normal karyotype and does not have any chromosomal abnormality). This currently requires a biopsy of the polar body or removal a cell from the embryo for screening. Both procedures are expensive, invasive and risk damage to the oocyte or embryo.

[0005] Cumulus cells (CCs) are differentiated granulosa cells that form layers surrounding the oocyte in antral follicles. Bi-directional communication is established between the CCs surrounding the oocyte via the formation of projections that pierce the zona pellucida and form gap junctions with the oocyte plasma membrane. These junctions enable the continuous exchange of proteins and metabolites between the two types of cells. Feuerstein, et al. (2007) Hum Reprod 22: 3069-3077. During the luteinizing hormone (LH) surge, CCs transmit a maturation-inducing signal from the extra-follicular environment to the enclosed oocyte, which in turn resumes meiosis, and this is only observed for pre-ovulatory follicles with sufficient LH receptors. Hillier (1994) Hum Reprod 9: 188-191. Additionally, in mice, it has been shown that correct meiotic spindle positioning is regulated via the cross-talk established between the oocyte and its surrounding CCs (cumulus cells). Barrett & Albertini (2010) J Assist Reprod Genet 27: 29-39.

[0006] Female meiosis is prone to chromosome malsegregation errors leading to aneuploidy, which increases dramatically with advancing age. Two main mechanisms have been described: the first involves the non-disjunction of entire chromosomes, observed during both meiotic divisions [Zenzes & Casper (1992) Hum Genet 88: 367-375], and the second involves the premature division of a chromosome into its two constituent chromatids (predivision), followed by their random segregation, upon completion of the first and/or second meiotic division. Angell (1991) Hum Genet 86: 383-387. The direct and very close relationship between advancing female age and increasing aneuploidy rates has been clearly and unequivocally demonstrated during the cytogenetic analysis of large numbers of human oocytes. Most such studies suggest that the expected oocyte aneuploidy rate for women under the age of 25 years is ˜5%, increasing to 10-25% by the early 30's and exceeding 50% in the oocytes of women over 40. Sandalinas, et al. (2002) Mol Hum Prod 8: 580-585; Kuliev, et al. (2003) RBM Online 6: 54-59; Pellestor, et al. (2003) Hum Genet 112: 195-203; Fragouli, et al. (2006) Hum Reprod 21: 2319-2328; Fragouli, et al. (2009) Reprod Biomed Online 19: 228-237; Fragouli, et al. (2010) Fertil Steril 94: 875-887.

[0007] Although genetic analyses, via preimplantation genetic screening (PGS), can reveal the presence of lethal chromosome anomalies in oocytes and embryos, the invasive nature of such procedures may have an adverse impact on embryonic viability and requires highly skilled embryologists, adding to the expense of such procedures. Thus, reproductive medicine would benefit greatly from a method capable of the noninvasive characterization and identification of those oocytes or embryos most likely to result in successful fertilization and implantation by measuring the level of marker expression associated with oocyte competence and oocyte incompetence.

### SUMMARY OF THE DISCLOSURE

[0008] The present invention contemplates a method of evaluating the competence of a mammalian oocyte for fertilization, or for implantation, or both wherein the methods comprise (i) obtaining a nucleic acid or polypeptide sample; (ii) determining the level of marker expression of at least one gene or polypeptide encoded thereby selected from the group of TP53I3 or SPSB2 in said sample; and (iii) comparing the level of marker expression TP53I3 or SPSB2 in the sample with a control or reference standard, wherein detecting differential marker expression between the sample and the control is indicative of the competence of an oocyte for implantation or fertilization.

[0009] In preferred embodiments, said TP53I3 gene is a human or non-human primate gene, e.g., at least 90, 95 or 100% identical to the TP53I3 gene having the e nucleic acid sequence of SEQ ID NO: 385, 387, or 389, or comprising the amino acid sequence of SEQ ID NO: 386, 388, or 390.

[0010] Also, in preferred embodiments the SPSB2 gene or polypeptide is a human or non-human primate gene or polypeptide, e.g., one at least 90, 95 or 100% identical to the SPSB2 gene having the nucleic acid sequence of SEQ ID NO: 252 or comprises a polypeptide at least 90, 95 or 100% identical to the amino acid sequence of SEQ ID NO: 351.

[0011] Also, the invention includes arrays for use in such detection methods, i.e., arrays comprising at least SPSB2 and TP53I3 genes or nucleic acids, primers, polypeptides or antibodies which specifically detect, amplify, or bind to SPSB2 and TP53I3 nucleic acids or polypeptides.

[0012] Also, the invention specifically includes arrays for use in such detection methods, that comprise primers which amplify SPSB2 and TP53I3 nucleic acids.

[0013] Also, the invention specifically includes arrays for use in such detection methods, that comprise antibodies or nucleic acids which specifically bind SPSB2 and TP53I3 polypeptides.

[0014] Also, the invention specifically includes arrays for use in such detection methods, that comprise nucleic acids or polypeptides that are at least 90% identical to the TP53I3 nucleic acid sequence of SEQ ID NO: 385, 387, or 389, or the amino acid sequence of SEQ ID NO: 386, 388, or 390 and/or to the SPSB2 nucleic acid sequence of SEQ ID NO: 252 and/or the amino acid sequence of SEQ ID NO: 351.

[0015] Also, the invention specifically includes arrays for use in such detection methods, that comprise nucleic acids or polypeptides that are at least 95% identical to the TP53I3 nucleic acid sequence of SEQ ID NO: 385, 387, or 389, or the amino acid sequence of SEQ ID NO: 386, 388, or 390 or to the SPSB2 nucleic acid sequence of SEQ ID NO: 252 or the amino acid sequence of SEQ ID NO: 351.

[0016] Also, the invention specifically includes arrays for use in such detection methods, that comprise nucleic acids or polypeptides that are identical to the TP53I3 nucleic acid sequence of SEQ ID NO: 385, 387, or 389, or the amino acid sequence of SEQ ID NO: 386, 388, or 390, and to the SPSB2 nucleic acid sequence of SEQ ID NO: 252 and/or the amino acid sequence of SEQ ID NO: 351.

[0017] Also, the invention specifically includes arrays for use in such detection methods, that comprise nucleic acid primers that amplify the TP53I3 nucleic acid sequence of SEQ ID NO: 385, 387, or 389 and/or the SPSB2 nucleic acid sequence of SEQ ID NO: 252.

[0018] Also, the invention specifically includes arrays for use in such detection methods, wherein said TP53I3 gene are human or non-human primate genes and said nucleic acid, primer, polypeptide or antibody is a human or non-human primate gene, or a nucleic acid, primer, polypeptide or an antibody that specifically amplifies or specifically binds to said human or non-human primate gene, nucleic acid or polypeptide.

[0019] In some embodiments the method further comprises determining in a sample the level of markers expression in addition to SPSB2 and TP53I3 selected from at least one nucleic acid selected from the group of nucleic acids exemplified by SEQ ID NOS:1-92 and 183-292, and comparing the level of marker expression in the sample with a control or reference standard, wherein detecting differential marker expression between the sample and the control may be indicative of the competence of the oocyte for fertilization, or for implantation, or for both.

[0020] It may be an aspect of the invention that the sample may be derived from an oocyte, follicular fluid, cumulus cell, or culture medium. The control or reference standard may be derived from an oocyte competent for implantation, an oocyte not competent for implantation, an oocyte competent for fertilization, an oocyte not competent for fertilization, a chromosomally normal oocyte, a chromosomally abnormal oocyte, follicular fluid associated with an oocyte competent for implantation, follicular fluid associated with an oocyte not competent for implantation, follicular fluid associated with an oocyte competent for fertilization, follicular fluid associated with an oocyte not competent for fertilization, follicular fluid associated with a chromosomally normal oocyte, follicular fluid associated with a chromosomally abnormal oocyte, culture medium associated with an oocyte competent for implantation, culture medium associated with an oocyte not competent for implantation, culture medium associated with an oocyte competent for fertilization, culture medium associated with an oocyte not competent for fertilization, culture medium associated with a chromosomally normal oocyte, culture medium associated with a chromosomally abnormal oocyte, a cumulus cell associated with an oocyte competent for implantation, a cumulus cell associated with an oocyte not competent for implantation, a cumulus cell associated with an oocyte competent for fertilization, a cumulus cell associated with an oocyte not competent for fertilization, a cumulus cell associated with a chromosomally normal oocyte, a cumulus cell associated with a chromosomally abnormal oocyte, follicular fluid associated with a cumulus cell associated with an oocyte competent for implantation, follicular fluid associated with a cumulus cell associated with an oocyte not competent for implantation, follicular fluid associated with a cumulus cell associated with an oocyte competent for fertilization, follicular fluid associated with a cumulus cell associated with an oocyte not competent for fertilization, follicular fluid associated with a cumulus cell associated with a chromosomally normal oocyte, follicular fluid associated with a cumulus cell associated with a chromosomally abnormal oocyte, culture medium associated with a cumulus cell associated with an oocyte competent for implantation, culture medium associated with a cumulus cell associated with an oocyte not competent for implantation, culture medium associated with a cumulus cell associated with an oocyte competent for fertilization, culture medium associated with a cumulus cell associated with an oocyte not competent for fertilization, culture medium associated with a cumulus cell associated with a chromosomally normal oocyte, culture medium associated with a cumulus cell associated with a chromosomally abnormal oocyte or combinations thereof.

[0021] In one aspect, the level of marker expression determined in the sample may be at least about 20% different from the level of marker expression determined in the control or reference standard. In one aspect, the level of marker expression may be detected by nucleic acid microarray, Northern blot, or reverse transcription PCR. In another aspect, the level of marker expression may be detected by Western blot, immunoassay, enzyme-linked immunosorbent assay, protein microarray or FACS analysis.

[0022] It may be an aspect of the invention that the cumulus cell are human, but the cumulus cell may also be of a mammal.

[0023] In another aspect, the invention comprises an array of nucleic acid probes immobilized on a solid support, the probe set comprising a plurality of probes including those specific to least SPSB2 and TP53I3 genes, each probe comprising a segment of at least twenty nucleotides exactly complementary to a subsequence of a set of reference sequences, wherein the set of reference sequences comprises probes including those specific to least SPSB2 and TP53I3 genes and may in addition include sequence selected from SEQ ID NOS:1-92.

[0024] In another aspect, the invention comprises an array of nucleic acid probes immobilized on a solid support, the probe set comprising a plurality of probes, each probe comprising a segment of at least twenty nucleotides exactly complementary to a subsequence of a set of reference sequences, wherein the set of reference sequences comprises SEQ ID NOS:183-282.

[0025] In one embodiment, a method of evaluating the competence of a mammalian oocyte for implantation may comprise determining the level of marker expression of at least one nucleic acid selected from the group of nucleic acids consisting of SEQ ID NOS: 1-92 in said sample; and comparing the level of marker expression in the sample with a control or reference standard, wherein detecting differential marker expression between the sample and the control may be indicative of the competence of the oocyte for implantation.

[0026] In one embodiment, a method of evaluating the competence of a mammalian oocyte for implantation may comprise determining the level of marker expression of at least one nucleic acid that encodes SPSB2 and TP53I3 or polypeptide encoded thereby and optionally another gene or amino acid sequence selected from the group of amino acids consisting of SEQ ID NOS: 93-182 in said sample; and comparing the level of marker expression in the sample with a control or reference standard, wherein detecting differential marker expression between the sample and the control may be indicative of the competence of the oocyte for implantation.

[0027] In one embodiment, a method of evaluating the competence of a mammalian oocyte for implantation may comprise determining the level of marker expression of at least one nucleic acid that encodes SPSB2 and TP53I3 or polypeptide encoded thereby and optionally another amino acid or nucleic acid including one selected from the group of amino acids consisting of SEQ ID NOS: 93-182 in said sample; and comparing the level of marker expression in the sample with a control or reference standard, wherein detecting differential marker expression between the sample and the control may be indicative of the competence of the oocyte for implantation.

[0028] In one embodiment, a method of evaluating the competence of a mammalian oocyte for fertilization may comprise determining the level of marker expression of at least one nucleic acid that encodes SPSB2 and TP53I3 or polypeptide encoded thereby and optionally another nucleic acid selected from the group of nucleic acids consisting of SEQ ID NOS: 1-92 in said sample; and comparing the level of marker expression in the sample with a control or reference standard, wherein detecting differential marker expression between the sample and the control may be indicative of the competence of the oocyte for fertilization.

[0029] In one embodiment, a method of evaluating the competence of a mammalian oocyte for fertilization may comprise determining the level of marker expression of at least one nucleic acid that encodes SPSB2 and TP53I3 or polypeptide encoded thereby and optionally another nucleic acid that encodes an amino acid sequence selected from the group of amino acids consisting of SEQ ID NOS: 93-182 in said sample; and comparing the level of marker expression in the sample with a control or reference standard, wherein detecting differential marker expression between the sample and the control may be indicative of the competence of the oocyte for fertilization. In one embodiment, a method of evaluating the competence of a mammalian oocyte for fertilization may comprise determining the level of marker expression of at least one nucleic acid that encodes SPSB2 and TP53I3 or polypeptide encoded thereby and optionally another amino acid selected from the group of amino acids consisting of SEQ ID NOS: 93-182 in said sample; and comparing the level of marker expression in the sample with a control or reference standard, wherein detecting differential marker expression between the sample and the control may be indicative of the competence of the oocyte for fertilization. In another embodiment, the method may further comprise obtaining a sample. In another embodiment, the sample may be a nucleic acid sample or an amino acid sample.

[0030] In one embodiment, the sample may be derived from an oocyte. In another embodiment, the control or reference standard may be derived from one of the group consisting of an oocyte competent for implantation, a chromosomally normal oocyte, an oocyte not competent for implantation, and a chromosomally abnormal oocyte.

[0031] In one embodiment, the sample may be derived from follicular fluid. In another embodiment, the control or reference standard may be derived from one of the group consisting of follicular fluid associated with an oocyte competent for implantation, follicular fluid associated with a chromosomally normal oocyte, follicular fluid associated with an oocyte not competent for implantation and follicular fluid associated with a chromosomally abnormal oocyte.

[0032] In one embodiment, the sample may be derived from culture medium. In another embodiment, the control or reference standard may be derived from one of the group consisting of culture medium associated with an oocyte competent for implantation, culture medium associated with a chromosomally normal oocyte, culture medium associated with an oocyte not competent for implantation, and culture medium associated with a chromosomally abnormal oocyte.

[0033] In one embodiment, a method of evaluating the competence of a mammalian oocyte for implantation may comprise determining the level of marker expression of at least one nucleic acid that encodes SPSB2 and TP53I3 or polypeptide encoded thereby and optionally another nucleic acid selected from the group of nucleic acids consisting of SEQ ID NOS: 183-282 in said sample; and comparing the level of marker expression in the sample with a control or reference standard, wherein detecting differential marker expression between the sample and the control may be indicative of the competence of the oocyte for implantation.

[0034] In one embodiment, a method of evaluating the competence of a mammalian oocyte for implantation may comprise determining the level of marker expression of at least one nucleic acid that encodes SPSB2 and TP53I3 or polypeptide encoded thereby and optionally another nucleic acid that encodes an amino acid sequence selected from the group of amino acids consisting of SEQ ID NOS: 183-282 in said sample; and comparing the level of marker expression in the sample with a control or reference standard, wherein detecting differential marker expression between the sample and the control may be indicative of the competence of the oocyte for implantation.

[0035] In one embodiment, a method of evaluating the competence of a mammalian oocyte for implantation may comprise determining the level of marker expression of at least one of at least one nucleic acid that encodes SPSB2 and TP53I3 or polypeptide encoded thereby and optionally another amino acid selected from the group of amino acids consisting of SEQ ID NOS: 283-390 in said sample; and comparing the level of marker expression in the sample with a control or reference standard, wherein detecting differential marker expression between the sample and the control may be indicative of the competence of the oocyte for implantation.

[0036] In one embodiment, a method of evaluating the competence of a mammalian oocyte for fertilization may comprise determining the level of marker expression of at least one nucleic acid that encodes SPSB2 and TP53I3 or polypeptide encoded thereby and optionally another one nucleic acid selected from the group of nucleic acids consisting of SEQ ID NOS: 183-282 in said sample; and comparing the level of marker expression in the sample with a control or reference standard, wherein detecting differential marker expression between the sample and the control may be indicative of the competence of the oocyte for fertilization.

[0037] In one embodiment, a method of evaluating the competence of a mammalian oocyte for fertilization may comprise determining the level of marker expression of at least one nucleic acid that encodes SPSB2 and TP53I3 or polypeptide encoded thereby and optionally another nucleic acid that encodes an amino acid sequence selected from the group of amino acids consisting of SEQ ID NOS: 183-282 in said sample; and comparing the level of marker expression in the sample with a control or reference standard, wherein detecting differential marker expression between the sample and the control may be indicative of the competence of the oocyte for fertilization.

[0038] In one embodiment, a method of evaluating the competence of a mammalian oocyte for fertilization may comprise determining the level of marker expression of at least one nucleic acid that encodes SPSB2 and TP53I3 or polypeptide encoded thereby and optionally another amino acid selected from the group of amino acids consisting of SEQ ID NOS: 283-390 in said sample; and comparing the level of marker expression in the sample with a control or reference standard, wherein detecting differential marker expression between the sample and the control may be indicative of the competence of the oocyte for fertilization.

[0039] In another embodiment, the method may further comprise obtaining a sample. In another embodiment, the sample may be a nucleic acid sample or an amino acid sample.

[0040] In one embodiment, the sample may be derived from a cumulus cell. In one embodiment, the control or reference standard may be derived from one of the group consisting of a cumulus cell associated with an oocyte competent for implantation, a cumulus cell associated with a chromosomally normal oocyte, a cumulus cell associated with an oocyte not competent for implantation and a cumulus cell associated with a chromosomally abnormal oocyte.

[0041] In one embodiment, the sample may be derived from follicular fluid. In another embodiment, the control or reference standard may be derived from one of the group consisting of follicular fluid associated with a cumulus cell associated with an oocyte competent for implantation, follicular fluid associated with a cumulus cell associated with a chromosomally normal oocyte, follicular fluid associated with a cumulus cell associated with an oocyte not competent for implantation and follicular fluid associated with a cumulus cell associated with a chromosomally abnormal oocyte.

[0042] In one embodiment, the sample may be derived from culture medium. In another embodiment, the control or reference standard may be derived from one of the group consisting of culture medium associated with a cumulus cell associated with an oocyte competent for implantation, culture medium associated with a cumulus cell associated with a chromosomally normal oocyte, culture medium associated with a cumulus cell associated with an oocyte not competent for implantation, and culture medium associated with a cumulus cell associated with a chromosomally abnormal oocyte.

[0043] In one embodiment, the level of marker expression determined in the sample may be at least 20% different from the level of marker expression determined in the control or reference standard. In another embodiment, the level of marker expression may be detected by nucleic acid microarray, Northern blot, real-time PCR, or reverse transcription PCR. In another embodiment, the level of marker expression may be detected by Western blot, immunoassay (e.g., enzyme-linked immunosorbent assay), protein microarray, or FACS analysis.

[0044] In one embodiment, the mammalian oocyte may be a domesticated mammal. In another embodiment, the mammalian oocyte may be a human, cat, dog, cow, pig, goat, sheep, or camel. In a further embodiment, the mammalian oocyte may be a human oocyte.

[0045] In one embodiment, the method of evaluating the competence of a mammalian oocyte for implantation may comprise determining the level of marker expression of at least one gene selected from the group consisting of at least one nucleic acid that encodes SPSB2 and TP53I3 or polypeptide encoded thereby and optionally another selected from B3GALNT2, C22orf29, CCL16, DCBLD1, DCC1, DHX9, OTUD5, RBBP6, SEPT11, SLC25A36, and TACSTD2, Unassigned (helicase), in said sample; and comparing the level of marker expression in the sample with a control or reference standard, wherein detecting differential marker expression between the sample and the control may be indicative of the competence of the oocyte for implantation. In another embodiment, the method of evaluating the competence of a mammalian oocyte for fertilization may comprise determining the level of marker expression of at least one gene selected from the group consisting of at least one nucleic acid that encodes SPSB2 and TP53I3 or polypeptide encoded thereby and optionally another gene or polypeptide selected from B3GALNT2, C22orf29, CCL16, DCBLD1, DCC1, DHX9, OTUD5, RBBP6, SEPT11, SLC25A36, TACSTD2, Unassigned (helicase), in said sample; and comparing the level of marker expression in the sample with a control or reference standard, wherein detecting differential marker expression between the sample and the control may be indicative of the competence of the oocyte for fertilization. In another embodiment, the method may further comprise obtaining a sample. In another embodiment, the sample may be a nucleic acid sample or an amino acid sample. In a further embodiment, the sample may be derived from a cumulus cell. In a further embodiment, the sample may be derived from an oocyte. In a further embodiment, the sample may be derived from a polar body. In a further embodiment, the sample may be a nucleic acid sample. In a further embodiment, the sample may be an amino acid sample.

[0046] In one embodiment, the control or reference standard may be derived from one of the group consisting of a cumulus cell associated with an oocyte competent for implantation, a cumulus cell associated with a chromosomally normal oocyte, a cumulus cell associated with an oocyte not competent for implantation and a cumulus cell associated with a chromosomally abnormal oocyte.

[0047] In one embodiment, the sample may be derived from follicular fluid. In one embodiment, the control or reference standard may be derived from one of the group consisting of follicular fluid associated with a cumulus cell associated with an oocyte competent for implantation, follicular fluid associated with a cumulus cell associated with a chromosomally normal oocyte, follicular fluid associated with a cumulus cell associated with an oocyte not competent for implantation and follicular fluid associated with a cumulus cell associated with a chromosomally abnormal oocyte.

[0048] In one embodiment, the sample may be derived from culture medium. In one embodiment, the control or reference standard may be derived from one of the group consisting of culture medium associated with a cumulus cell associated with an oocyte competent for implantation, culture medium associated with a cumulus cell associated with a chromosomally normal oocyte, culture medium associated with a cumulus cell associated with an oocyte not competent for implantation, and culture medium associated with a cumulus cell associated with a chromosomally abnormal oocyte.

[0049] In one embodiment, the level of marker expression determined in the sample may be at least 20% different from the level of marker expression determined in the control or reference standard. In another embodiment, the level of marker expression may be detected by nucleic acid microarray, cytogenetic analysis (aCGH), real-time PCR, TLDA, Northern blot, or reverse transcription PCR. In another embodiment, the level of marker expression may be detected by Western blot, immunoassay (e.g., enzyme-linked immunosorbent assay), protein microarray, or FACS analysis.

[0050] In one embodiment, the mammalian oocyte may be a domesticated mammal. In another embodiment, the mammalian oocyte may be a human.

[0051] In one embodiment, the method detects chromosomal abnormalities in the oocyte including but not limited to aneuploidy, translocation, deletion, and duplication.

[0052] In one embodiment, B3GALNT2 may be encoded by the nucleic acid sequence of SEQ ID NO: 185 or comprises the amino acid sequence of SEQ ID NO: 285. In another embodiment, C22orf29 may be encoded by the nucleic acid sequence of SEQ ID NO: 381 or comprises the amino acid sequence of SEQ ID NO: 382. In another embodiment, CCL16 may be encoded by the nucleic acid sequence of SEQ ID NO: 187 or comprises the amino acid sequence of SEQ ID NO: 287. In another embodiment, DCBLD1 may be encoded by the nucleic acid sequence of SEQ ID NO: 291 or comprises the amino acid sequence of SEQ ID NO: 291. In another embodiment, DHX9 may be encoded by the nucleic acid sequence of SEQ ID NO: 188 or comprises the amino acid sequence of SEQ ID NO: 288. In another embodiment, OTUD5 may be encoded by the nucleic acid sequence of SEQ ID NO: 193 or comprises the amino acid sequence of SEQ ID NO: 293. In another embodiment, RBBP6 may be encoded by the nucleic acid sequence of SEQ ID NO: 184 or comprises the amino acid sequence of SEQ ID NO: 284. In another embodiment, SEPT11 may be encoded by the nucleic acid sequence of SEQ ID NO: 192 or comprises the amino acid sequence of SEQ ID NO: 292. In another embodiment, SLC25A36 may be encoded by the nucleic acid sequence of SEQ ID NO: 190 or comprises the amino acid sequence of SEQ ID NO: 290. In another embodiment, SPSB2 may be encoded by the nucleic acid sequence of SEQ ID NO: 252 or comprises the amino acid sequence of SEQ ID NO: 351. In another embodiment, TACSTD2 may be encoded by the nucleic acid sequence of SEQ ID NO: 383 or comprises the amino acid sequence of SEQ ID NO: 384. In another embodiment, TP53I3 may be encoded by the nucleic acid sequence of SEQ ID NO: 385, 387, or 389, or comprises the amino acid sequence of SEQ ID NO: 386, 388, or 390.

[0053] In one embodiment, an array may comprise at least one gene selected from the group consisting of B3GALNT2, C22orf29, CCL16, DCBLD1, DCC1, DHX9, OTUD5, RBBP6, SEPT11, SLC25A36, SPSB2, TACSTD2, Unassigned (helicase), and TP53I3. In another embodiment, the array may comprise at least two of said genes. In one embodiment, B3GALNT2 may be encoded by the nucleic acid sequence of SEQ ID NO: 185 or comprises the amino acid sequence of SEQ ID NO: 285.

[0054] In one embodiment, C22orf29 may be encoded by the nucleic acid sequence of SEQ ID NO: 381 or comprises the amino acid sequence of SEQ ID NO: 382. In one embodiment, CCL16 may be encoded by the nucleic acid sequence of SEQ ID NO: 187 or comprises the amino acid sequence of SEQ ID NO: 287. In one embodiment, DCBLD1 may be encoded by the nucleic acid sequence of SEQ ID NO: 291 or comprises the amino acid sequence of SEQ ID NO: 291. In one embodiment, DHX9 may be encoded by the nucleic acid sequence of SEQ ID NO: 188 or comprises the amino acid sequence of SEQ ID NO: 288. In one embodiment, OTUD5 may be encoded by the nucleic acid sequence of SEQ ID NO: 193 or comprises the amino acid sequence of SEQ ID NO: 293. In one embodiment, RBBP6 may be encoded by the nucleic acid sequence of SEQ ID NO: 184 or comprises the amino acid sequence of SEQ ID NO: 284. In one embodiment, SEPT11 may be encoded by the nucleic acid sequence of SEQ ID NO: 192 or comprises the amino acid sequence of SEQ ID NO: 292. In one embodiment, SLC25A36 may be encoded by the nucleic acid sequence of SEQ ID NO: 190 or comprises the amino acid sequence of SEQ ID NO: 290. In one embodiment, SPSB2 may be encoded by the nucleic acid sequence of SEQ ID NO: 252 or comprises the amino acid sequence of SEQ ID NO: 351. In one embodiment, TACSTD2 may be encoded by the nucleic acid sequence of SEQ ID NO: 383 or comprises the amino acid sequence of SEQ ID NO: 384. In one embodiment, TP53I3 may be encoded by the nucleic acid sequence of SEQ ID NO: 385, 387, or 389, or comprises the amino acid sequence of SEQ ID NO: 386, 388, or 390.

### BRIEF DESCRIPTION OF THE DRAWINGS

[0055] FIG. 1 depicts an exemplary methodology for the assessment of the competence of oocytes for fertilization and/or implantation.

[0056] FIG. 2 depicts the expression of SPSB2 in cumulus cells (CCs) related to pregnancy outcome.

[0057] FIG. 3 contains the expression patterns seen for SPSB2 and TP53I3 in CCs of normal and aneuploid oocytes.

[0058] FIG. 4 shows the differences in expression between the two sample groups approached statistical significance (P=0.054 two tailed t-test), and are illustrated in the box plot.

[0059] FIG. 5 contains real-time PCR analysis of SPSB2 and TP53I3 in cumulus cells associated with chromosomally normal or aneuploid oocytes.

### DETAILED DESCRIPTION OF THE INVENTION

### Definitions

[0060] It is to be understood that this invention is not limited to the particular methodology, protocols, cell lines, animal species or genera, and reagents described, as such may vary. It is also to be understood that the terminology used herein is for the purpose of describing particular embodiments only, and is not intended to limit the scope of the present invention which will be limited only by the appended claims.

[0061] As used herein the singular forms “a”, “and”, and “the” include plural referents unless the context clearly dictates otherwise. Thus, for example, reference to “a cell” includes a plurality of such cells and reference to “the protein” includes reference to at least one proteins and equivalents thereof known to those skilled in the art, and so forth. All technical and scientific terms used herein have the same meaning as commonly understood to one of ordinary skill in the art to which this invention belongs unless clearly indicated otherwise. The articles “a” and “an” are used herein to refer to one or to more than one (i.e. to at least one) of the grammatical object of the article. By way of example, “an element” means one element or more than one element.

[0062] Allele as used herein broadly refers to one specific form of a genetic sequence (such as a gene) within a cell, an individual or within a population, the specific form differing from other forms of the same gene in the sequence of at least one, and frequently more than one, variant sites within the sequence of the gene. The sequences at these variant sites that differ between different alleles are termed “variants”, “polymorphisms”, or “mutations”.

[0063] Amplification as used herein, refers broadly to the amplification of polynucleotide sequences is the in vitro production of multiple copies of a particular nucleic acid sequence. The amplified sequence is usually in the form of DNA. A variety of techniques for carrying out such amplification are known in the art. See, e.g., Van Brunt (1990) Bio/Technol. 8(4): 291-294. Polymerase chain reaction or PCR is a prototype of nucleic acid amplification, and use of PCR herein should be considered exemplary of other suitable amplification techniques.

[0064] Antibody as used herein refers broadly to an immunoglobulin molecule which is able to specifically bind to a specific epitope on an antigen. Antibodies can be intact immunoglobulins derived from natural sources or from recombinant sources and can be immunoreactive portions of intact immunoglobulins. Antibodies are typically tetramers of immunoglobulin molecules. The antibodies in the present invention may exist in a variety of forms including, for example, polyclonal antibodies, monoclonal antibodies, Fv, Fab and F(ab)2, as well as single chain antibodies and humanized antibodies. Harlow & Lane (1999) Using Antibodies: A Laboratory Manual Cold Spring Harbor Laboratory Press; Houston, et al. (1988) Proc. Natl. Acad. Sci. USA 85:5879-5883; Bird, et al. (1988) Science 242:423-426.

[0065] Array as used herein refers broadly to a support, preferably solid, with nucleic acid probes attached to the support. Preferred arrays typically comprise a plurality of different nucleic acid probes that are coupled to a surface of a substrate in different, known locations. These arrays, also described as “microarrays” or colloquially “chips” have been generally described in the art, for example, U.S. Pat. Nos. 5,143,854, 5,445,934, 5,744,305, 5,677,195, 5,800,992, 6,040,193, 5,424,186 and Fodor et al., 1991, Science, 251:767-777, each of which is incorporated by reference in its entirety for all purposes.

[0066] Aneuploidy as used herein refers broadly to an abnormal number of chromosomes, and is a type of chromosome abnormality. For example, humans have 46 chromosomes comprising 23 pairs of chromosomes, an example of aneuploidy being trisomy 21, where the patient has three copies of chromosome 21. Further examples of aneuploidy include but are not limited to monosomy, where the patient may lack one chromosome of the normal complement, and tetrasomy and pentasomy, where the patient has four or five copies, respectively, of a chromosome.

[0067] Characteristic level of expression of a cumulus gene as used herein refers broadly to a particular detected expressed nucleic acid sequence or polypeptide means that the particular gene or polypeptide is expressed at levels which are substantially similar to the levels observed in cumulus cells that are associated with a normal cumulus cell or one associated with a normal or developmentally competent oocyte.

[0068] Chromosome as used herein refers broadly to the heredity-bearing gene carrier of a cell which is derived from chromatin and which comprises DNA and protein components (especially histones). The conventional internationally recognized individual human genome chromosome numbering system is employed herein. The size of an individual chromosome can vary from one type to another within a given multi-chromosomal genome and from one genome to another. In the case of the human genome, the entire DNA mass of a given chromosome is usually greater than about 100,000,000 bp. For example, the size of the entire human genome is about 3×10⁹ bp. The largest chromosome, chromosome no. 1, contains about 2.4×10⁸ by while the smallest chromosome, chromosome no. 22, contains about 5.3×10⁷ bp.

[0069] Chromosomal region as used herein refers broadly to a portion of a chromosome. The actual physical size or extent of any individual chromosomal region can vary greatly. The term “region” is not necessarily definitive of a particular one or more genes because a region need not take into specific account the particular coding segments (exons) of an individual gene.

[0070] Polymorphism refers to the occurrence of two or more genetically determined alternative sequences or alleles in a population. A polymorphic marker or site is the locus at which divergence occurs. A polymorphism may comprise one or more base changes, an insertion, a repeat, or a deletion. A polymorphic locus may be as small as one base pair. The first identified allelic form is arbitrarily designated as the reference form and other allelic forms are designated as alternative or variant alleles. The allelic form occurring most frequently in a selected population is sometimes referred to as the wildtype form. A diallelic polymorphism has two forms. A triallelic polymorphism has three forms. A polymorphism between two nucleic acids can occur naturally, or be caused by exposure to or contact with chemicals, enzymes, or other agents, or exposure to agents that cause damage to nucleic acids, for example, ultraviolet radiation, mutagens or carcinogens.

[0071] Single nucleotide polymorphisms (SNPs) are positions at which two alternative bases occur at appreciable frequency (about at least 1%) in a given population. A SNP may arise due to substitution of one nucleotide for another at the polymorphic site. A transition is the replacement of one purine by another purine or one pyrimidine by another pyrimidine. A transversion is the replacement of a purine by a pyrimidine or vice versa. SNPs can also arise from a deletion of a nucleotide or an insertion of a nucleotide relative to a reference allele.

[0072] Control or reference standard as used herein refers broadly to a material comprising none, or a normal, low, or high level of one of more of the marker expression products of one or more the sequences listed herein in the accompanying sequence listing, such that the control or reference standard may serve as a comparator against which a sample can be compared. By way of non-limiting examples, a control or reference standard may include all or a part of any of an oocyte competent for implantation, an oocyte not competent for implantation, an oocyte competent for fertilization, an oocyte not competent for fertilization, a chromosomally normal oocyte, a chromosomally abnormal oocyte, follicular fluid associated with an oocyte competent for implantation, follicular fluid associated with an oocyte not competent for implantation, follicular fluid associated with an oocyte competent for fertilization, follicular fluid associated with an oocyte not competent for fertilization, follicular fluid associated with a chromosomally normal oocyte, follicular fluid associated with a chromosomally abnormal oocyte, culture medium associated with an oocyte competent for implantation, culture medium associated with an oocyte not competent for implantation, culture medium associated with an oocyte competent for fertilization, culture medium associated with an oocyte not competent for fertilization, culture medium associated with a chromosomally normal oocyte, culture medium associated with a chromosomally abnormal oocyte, a cumulus cell associated with an oocyte competent for implantation, a cumulus cell associated with an oocyte not competent for implantation, a cumulus cell associated with an oocyte competent for fertilization, a cumulus cell associated with an oocyte not competent for fertilization, a cumulus cell associated with a chromosomally normal oocyte, a cumulus cell associated with a chromosomally abnormal oocyte, follicular fluid associated with a cumulus cell associated with an oocyte competent for implantation, follicular fluid associated with a cumulus cell associated with an oocyte not competent for implantation, follicular fluid associated with a cumulus cell associated with an oocyte competent for fertilization, follicular fluid associated with a cumulus cell associated with an oocyte not competent for fertilization, follicular fluid associated with a cumulus cell associated with a chromosomally normal oocyte, follicular fluid associated with a cumulus cell associated with a chromosomally abnormal oocyte, culture medium associated with a cumulus cell associated with an oocyte competent for implantation, culture medium associated with a cumulus cell associated with an oocyte not competent for implantation, culture medium associated with a cumulus cell associated with an oocyte competent for fertilization, culture medium associated with a cumulus cell associated with an oocyte not competent for fertilization, culture medium associated with a cumulus cell associated with a chromosomally normal oocyte, culture medium associated with a cumulus cell associated with a chromosomally abnormal oocyte or combinations thereof.

[0073] Cumulus cell as used herein refers broadly to a cell comprised in a mass of cells that surrounds an oocyte. This is an example of an “oocyte associated cell”. These cells are believed to be involved in providing an oocyte some of its nutritional and or other requirements that are necessary to yield an oocyte which upon fertilization is “pregnancy competent” (Buccione, R., Schroeder, A. C., and Eppig, J. J. (1990). Interactions between somatic cells and germ cells throughout mammalian oogenesis. Biol Reprod 43, 543-547.)

[0074] Differential gene expression as used herein refers broadly to genes the expression of which varies within a tissue of interest; herein preferably a cell associated with an oocyte, e.g., a cumulus cell.

[0075] Determining the level of marker expression as used herein refers broadly to an assessment of the degree of expression of a marker in a sample at the nucleic acid or protein level, using technology available to the skilled artisan to detect a sufficient portion of any marker expression product (including nucleic acids and proteins) of any one of the sequences listed herein in the accompanying sequence listing, such that the sufficient portion of the marker expression product detected is indicative of the expression of any one of the sequences listed herein in the accompanying sequence listing.

[0076] Genome as used herein refers broadly to all the genetic material of an organism. In some instances, the term genome may refer to the chromosomal DNA. Genome may be multichromosomal such that the DNA is cellularly distributed among a plurality of individual chromosomes. For example, in human there are 22 pairs of chromosomes plus a gender associated XX or XY pair. DNA derived from the genetic material in the chromosomes of a particular organism is genomic DNA. The term genome may also refer to genetic materials from organisms that do not have chromosomal structure. In addition, the term genome may refer to mitochondria DNA. A genomic library is a collection of DNA fragments representing the whole or a portion of a genome. Frequently, a genomic library is a collection of clones made from a set of randomly generated, sometimes overlapping DNA fragments representing the entire genome or a portion of the genome of an organism.

[0077] Genotyping as used herein refers broadly to the determination of the genetic information an individual carries at one or more positions in the genome. For example, genotyping may comprise the determination of which allele or alleles an individual carries for a single SNP or the determination of which allele or alleles an individual carries for a plurality of SNPs. For example, a particular nucleotide in a genome may be an A in some individuals and a C in other individuals. Those individuals who have an A at the position have the A allele and those who have a C have the C allele. A polymorphic location may have two or more possible alleles and the array may be designed to distinguish between all possible combinations.

[0078] Heavy chain antibody or heavy chain antibodies as used herein refers broadly to immunoglobulin molecules derived from camelid species, either by immunization with an antigen and subsequent isolation of sera, or by the cloning and expression of nucleic acid sequences encoding such antibodies. The term “heavy chain antibody” or “heavy chain antibodies” further encompasses immunoglobulin molecules isolated from an animal with heavy chain disease, or prepared by the cloning and expression of V_{H} (variable heavy chain immunoglobulin) genes from an animal.

[0079] Homologous as used herein refers broadly to the subunit sequence similarity between two polymeric molecules, e.g., between two nucleic acid molecules, e.g., two DNA molecules or two RNA molecules, or between two polypeptide molecules. When a subunit position in both of the two molecules is occupied by the same monomeric subunit, e.g., if a position in each of two DNA molecules is occupied by adenine, then they are homologous at that position. The homology between two sequences is a direct function of the number of matching or homologous positions, e.g., if half (e.g., five positions in a polymer ten subunits in length) of the positions in two compound sequences are homologous then the two sequences are 50% homologous, if 90% of the positions, e.g., 9 of 10, are matched or homologous, the two sequences share 90% homology. By way of example, the DNA sequences 3′ATTGCC5′ and 3′TATGGC share 50% homology.

[0080] Homology, as used herein, refers broadly to a degree of similarity between a nucleic acid sequence and a reference nucleic acid sequence or between a polypeptide sequence and a reference polypeptide sequence. Homology may be partial or complete. Complete homology indicates that the nucleic acid or amino acid sequences are identical. A partially homologous nucleic acid or amino acid sequence is one that is not identical to the reference nucleic acid or amino acid sequence. The degree of homology can be determined by sequence comparison. The term “sequence identity” may be used interchangeably with “homology.” As used herein, “homology” is used synonymously with “identity.” In addition, when the term “homology” is used herein to refer to the nucleic acids and proteins, it should be construed to be applied to homology at both the nucleic acid and the amino acid levels. The determination of percent identity between two nucleotide or amino acid sequences can be accomplished using a mathematical algorithm. For example, a mathematical algorithm useful for comparing two sequences is the algorithm of Karlin and Altschul (1990) Proc. Natl. Acad. Sci. USA 87: 2264-2268), modified as in Karlin and Altschul (1993) Proc. Natl. Acad. Sci. USA 90: 5873-5877. This algorithm is incorporated into the NBLAST and XBLAST programs of Altschul, et al. (1990) J. Mol. Biol. 215: 403-410, and can be accessed, for example, at the National Center for Biotechnology Information (NCBI) world wide web site having the universal resource locator www.ncbi.nlm.nih.gov/BLAST/. BLAST nucleotide searches can be performed with the NBLAST program (designated “blastn” at the NCBI web site), using the following parameters: gap penalty=5; gap extension penalty=2; mismatch penalty=3; match reward=1; expectation value 10.0; and word size=11 to obtain nucleotide sequences homologous to a nucleic acid described herein. BLAST protein searches can be performed with the XBLAST program (designated “blastn” at the NCBI web site) or the NCBI “blastp” program, using the following parameters: expectation value 10.0, BLOSUM62 scoring matrix to obtain amino acid sequences homologous to a protein molecule described herein.

[0081] To obtain gapped alignments for comparison purposes, Gapped BLAST can be utilized as described in Altschul, et al. (1997) Nucleic Acids Res. 25: 3389-3402. Alternatively, PSI-Blast or PHI-Blast can be used to perform an iterated search which detects distant relationships between molecules (id.) and relationships between molecules which share a common pattern. When utilizing BLAST, Gapped BLAST, PSI-Blast, and PHI-Blast programs, the default parameters of the respective programs (e.g., XBLAST and NBLAST) can be used. See www.ncbi.nlm.nih.gov. The percent identity between two sequences can be determined using techniques similar to those described above, with or without allowing gaps. In calculating percent identity, typically exact matches are counted.

[0082] Isolated, as used herein, refers broadly to material removed from its original environment in which it naturally occurs, and thus is altered by the hand of man from its natural environment. Isolated material may be, for example, exogenous nucleic acid included in a vector system, exogenous nucleic acid contained within a host cell, or any material which has been removed from its original environment and thus altered by the hand of man (e.g., “isolated antibody”).

[0083] Mammal, as used herein, refers broadly to any and all warm-blooded vertebrate animals of the class Mammalia, including humans, characterized by a covering of hair on the skin and, in the female, milk-producing mammary glands for nourishing the young. Examples of mammals include but are not limited to alpacas, armadillos, capybaras, cats, camels, chimpanzees, chinchillas, cattle, dogs, goats, gorillas, hamsters, horses, humans, lemurs, llamas, mice, non-human primates, pigs, rats, sheep, shrews, squirrels, and tapirs. Mammals include but are not limited to bovine, canine, equine, feline, murine, ovine, porcine, primate, and rodent species. Domesticated mammals refer broadly to any mammalian species domesticated including but not limited to cattle, sheep, pigs, horses, camels, llamas, and goats. Mammal also includes any and all those listed on the Mammal Species of the World maintained by the National Museum of Natural History, Smithsonian Institution in Washington D.C.

[0084] Method for detecting differential expressed genes as used herein refers broadly to any known method for quantitatively evaluating differential gene expression using a probe that specifically detects for the expressed gene transcript or encoded polypeptide. Examples of such methods include indexing differential display reverse transcription polymerase chain reaction (DDRT-PCR; Mahadeva et al, 1998, J. Mol. Biol. 284:1391-1318; WO 94/01582; subtractive mRNA hybridization (See Advanced Mol. Biol.; R. M. Twyman (1999) Bios Scientific Publishers, Oxford, p. 334, the use of nucleic acid arrays or microarrays (see Nature Genetics, 1999, vol. 21, Suppl. 1061) and the serial analysis of gene expression. (SAGE) See e.g., Valculesev et al, Science (1995) 270:484-487) and real time PCR (RT-PCR). For example, differential levels of a transcribed gene in an oocyte cell can be detected by use of Northern blotting, and/or RT-PCR. A referred method is the CRL amplification protocol refers to the novel total RNA amplification protocol disclosed in Applicant's earlier applications that combines template-switching PCR and T7 based amplification methods. This protocol is well suited for samples wherein only a few cells or limited total RNA is available.

[0085] Marker expression as used herein refers broadly to the transcription, translation, post-translation modification, and phenotypic manifestation of a gene, including all aspects of the transformation of information encoded in a gene into RNA or protein. By way of non-limiting example, marker expression includes transcription into messenger RNA (mRNA) and translation into protein, as well as transcription into types of RNA such as transfer RNA (tRNA) and ribosomal RNA (rRNA) that are not translated into protein.

[0086] Microarray analysis as used herein refers broadly to the quantification of the expression levels of specific genes in a particular sample, e.g., tissue or cell sample.

[0087] Match, perfect match, perfect match probe, or perfect match control as used herein refers broadly to a nucleic acid that has a sequence that is perfectly complementary to a particular target sequence. The nucleic acid is typically perfectly complementary to a portion (subsequence) of the target sequence. A perfect match (PM) probe can be a “test probe”, a “normalization control” probe, an expression level control probe and the like. A perfect match control or perfect match is, however, distinguished from a “mismatch” or “mismatch probe.”

[0088] Mismatch, mismatch control, or mismatch probe as used herein refers broadly to a nucleic acid whose sequence is not perfectly complementary to a particular target sequence. As a non-limiting example, for each mismatch (MM) control in a high-density probe array there typically exists a corresponding perfect match (PM) probe that is perfectly complementary to the same particular target sequence. The mismatch may comprise one or more bases. While the mismatch(es) may be located anywhere in the mismatch probe, terminal mismatches are less desirable because a terminal mismatch is less likely to prevent hybridization of the target sequence. In a particularly preferred embodiment, the mismatch is located at or near the center of the probe such that the mismatch is most likely to destabilize the duplex with the target sequence under the test hybridization conditions.

[0089] A homo-mismatch substitutes an adenine (A) for a thymine (T) and vice versa and a guanine (G) for a cytosine (C) and vice versa. For example, if the target sequence was: AGGTCCA, a probe designed with a single homo-mismatch at the central, or fourth position, would result in the following sequence: TCCTGGT.

[0090] In one embodiment, pairs are present in perfect match and mismatch pairs, one probe in each pair being a perfect match to the target sequence and the other probe being identical to the perfect match probe except that the central base is a homo-mismatch. Mismatch probes provide a control for non-specific binding or cross-hybridization to a nucleic acid in the sample other than the target to which the probe is directed. Thus, mismatch probes indicate whether hybridization is or is not specific. For example, if the target is present, the perfect match probes should be consistently brighter than the mismatch probes because fluorescence intensity, or brightness, corresponds to binding affinity. See e.g., U.S. Pat. No. 5,324,633. Finally, the difference in intensity between the perfect match and the mismatch probe (I(PM)−I(MM)) provides a good measure of the concentration of the hybridized material. See WO 98/11223.

[0091] Nucleic acids according to the present invention may include any polymer or oligomer of pyrimidine and purine bases, preferably cytosine, thymine, and uracil, and adenine and guanine, respectively. (See Albert L. Lehninger, Principles of Biochemistry, at 793-800 (Worth Pub. 1982). Indeed, the present invention contemplates any deoxyribonucleotide, ribonucleotide or peptide nucleic acid component, and any chemical variants thereof, such as methylated, hydroxymethylated or glucosylated forms of these bases, and the like. The polymers or oligomers may be heterogeneous or homogeneous in composition, and may be isolated from naturally occurring sources or may be artificially or synthetically produced. In addition, the nucleic acids may be DNA or RNA, or a mixture thereof, and may exist permanently or transitionally in single-stranded or double-stranded form, including homoduplex, heteroduplex, and hybrid states.

[0092] Nucleic acid or nucleic acid sequence, as used herein, refers broadly to a deoxyribonucleotide or ribonucleotide oligonucleotide in either single- or double-stranded form. The term encompasses nucleic acids, i.e., oligonucleotides, containing known analogs of natural nucleotides. The term also encompasses nucleic-acid-like structures with synthetic backbones. Unless otherwise indicated, a particular nucleic acid sequence also implicitly encompasses conservatively modified variants thereof (e.g., degenerate codon substitutions) and complementary sequences, as well as the sequence explicitly indicated. The term nucleic acid is used interchangeably with gene, cDNA, mRNA, oligonucleotide, and polynucleotide.

[0093] Oligonucleotide or polynucleotide as used herein refers broadly to a nucleic acid ranging from at least 2, preferably at least 8, 15 or 25 nucleotides in length, but may be up to 50, 100, 1000, or 5000 nucleotides long or a compound that specifically hybridizes to a polynucleotide. Polynucleotides include sequences of deoxyribonucleic acid (DNA) or ribonucleic acid (RNA) or mimetics thereof which may be isolated from natural sources, recombinantly produced or artificially synthesized. A further example of a polynucleotide of the present invention may be a peptide nucleic acid (PNA). See U.S. Pat. No. 6,156,501. The invention also encompasses situations in which there is a nontraditional base pairing such as Hoogsteen base pairing which has been identified in certain tRNA molecules and postulated to exist in a triple helix. “Polynucleotide” and “oligonucleotide” are used interchangeably in this disclosure.

[0094] Patient, as used herein, refers broadly to any animal who is in need of treatment either to alleviate a disease state or to prevent the occurrence or reoccurrence of a disease state. Also, “Patient” as used herein, refers broadly to any animal who has risk factors, a history of disease, susceptibility, symptoms, signs, was previously diagnosed, is at risk for, or is a member of a patient population for a disease. The patient may be a clinical patient such as a human or a veterinary patient such as a companion, domesticated, livestock, exotic, or zoo animal. The term “subject” may be used interchangeably with the term “patient”.

[0095] Probe as used herein refers broadly to a nucleic acid capable of binding to a target nucleic acid of complementary sequence through one or more types of chemical bonds, usually through complementary base pairing, usually through hydrogen bond formation. As used herein, a probe may include natural (i.e. A, G, U, C, or T) or modified bases (7-deazaguanosine, inosine, etc.). In addition, a linkage other than a phosphodiester bond may join the bases in probes, so long as it does not interfere with hybridization. Thus, probes may be peptide nucleic acids in which the constituent bases are joined by peptide bonds rather than phosphodiester linkages.

[0096] Real Time RT-PCR as used herein refers broadly to a method or device used therein that allows for the simultaneous amplification and quantification of specific RNA transcripts in a sample.

[0097] Specifically bind or specifically binds as used herein refers broadly to an antibody that preferentially binds to a particular antigenic epitope, but does not necessarily bind only to that particular antigenic epitope.

[0098] Solid support, support, and substrate as used herein, are used interchangeably, and refer broadly to a material or group of materials having a rigid or semi-rigid surface or surfaces. In one embodiment, at least one surface of the solid support will be substantially flat, although in some embodiments it may be desirable to physically separate synthesis regions for different compounds with, for example, wells, raised regions, pins, etched trenches, or the like. According to other embodiments, the solid support(s) will take the form of beads, resins, gels, microspheres, or other geometric configurations. See, e.g., U.S. Pat. No. 5,744,305 for exemplary substrates.

[0099] Substantially similar as used herein refers broadly to the levels of expression of individual genes are preferably within the range of +/−1-5 fold of the level of expression by a normal cumulus cell, more preferably within the range of +/−1-3-fold, still more preferably within the range of +1-1-1.5 fold and most preferably within the range of +/−1.0-1.3, 1.0-1.2 or 1.0-1.2 fold of the detected levels of expression of the gene or polypeptide by a normal cumulus cell.

[0100] Synthetic antibody as used herein refers broadly to an antibody which is generated using recombinant DNA technology, such as, for example, an antibody expressed by a bacteriophage as described herein. The term should also be construed to mean an antibody which has been generated by the synthesis of a DNA molecule encoding the antibody and which DNA molecule expresses an antibody protein, or an amino acid sequence specifying the antibody, wherein the DNA or amino acid sequence has been obtained using synthetic DNA or amino acid sequence technology which is available and well known in the art.

[0101] Target as used herein refers broadly to a molecule that has an affinity for a given probe. Targets may be naturally-occurring or man-made molecules. Also, they can be employed in their unaltered state or as aggregates with other species. Targets may be attached, covalently or noncovalently, to a binding member, either directly or via a specific binding substance. Examples of targets which can be employed by this invention include, but are not restricted to, oligonucleotides, nucleic acids, antibodies, cell membrane receptors, monoclonal antibodies and antisera reactive with specific antigenic determinants (e.g., on viruses, cells or other materials), drugs, peptides, cofactors, lectins, sugars, polysaccharides, cells, cellular membranes, and organelles. Targets are sometimes referred to in the art as anti-probes. As the term targets is used herein, no difference in meaning is intended.

[0102] Zona pellucida as used herein refers broadly to the outermost region of an oocyte.

### Non-Invasive Methods of Assessing Oocyte Competency

[0103] The methods described herein utilize the cumulus cells to derive information about the genetic and chromosomal status of the oocyte for implantation and fertilization purposes.

[0104] In the ovary, human oocytes are surrounded by a cloud of tiny cells, known as cumulus cells. The oocytes and the cumulus cells are in constant communication and depend upon each other for continued viability. The inventors surprisingly discovered that the presence of chromosome abnormalities, which occur in human oocytes and are incompatible with the formation of healthy embryos, affect the surrounding cumulus cells. For several decades known chromosome problems are common in human oocytes and are the major cause of miscarriage, and are responsible for conditions such as Trisomy 21.

[0105] Thus, chromosome abnormalities in the oocyte were found to result in changes in the surrounding cumulus cells, allowing for testing of the oocytes, before they are fertilized, revealing those with the correct number of chromosomes as well as those that are abnormal. These results are unexpected because cumulus cells (CCs) are routinely stripped off oocytes during IVF treatments and are usually discarded.

[0106] The inventors examined the polar bodies and cumulus cells from 26 oocytes donated by women undergoing pre-implantation genetic screening (PGS). The researchers identified a total of 13 normal and 13 abnormal oocytes by testing the polar bodies. The inventors examined the active individual genes in the cumulus cells that had surrounded each oocyte using two different methods. First, using a microarray it was surprisingly found that 729 genes were expressed differently in cumulus cells that surrounded oocytes that contained an incorrect number of chromosomes. In particular, 14 genes appeared to have highly significant differences in activity when their corresponding oocyte was abnormal. The inventors also analyzed that 95 of the 729 genes, including the 14 very significant genes using as real-time polymerase chain reaction (PCR). The real-time PCR confirmed that most of the genes highlighted by the microarray showed altered activity in cumulus cells associated with abnormal oocytes. Several of these genes are involved in vital cellular functions of the cumulus cells and oocyte they surround, such as cell signaling and regulation, hormonal response, and cell death. The present invention has the advantage of avoiding the fertilization of abnormal oocytes, which might have some ethical advantages over the current invasive methods. Also the present invention is faster and less expensive than current methods. In addition, current diagnostic methods available for preimplantation genetic screening only provide information on the chromosome status of an oocyte. Although this is an important aspect of oocyte quality, it is not the only factor influencing the ability of the oocyte to lead to a successful pregnancy. The extra genetic information available from examining the cumulus cells may provide more detailed evaluation of an oocyte's potential to lead to a successful pregnancy and a healthy live birth.

[0107] The method involves detecting the levels of expression of at least one nucleic acid that encodes SPSB2 and TP53I3 or polypeptide encoded thereby and optionally another gene or polypeptide listed in Tables 2 and 3 or the 14 genes selected from the group consisting of B3GALNT2, C22orf29, CCL16, DCBLD1, DCC1, DHX9, OTUD5, RBBP6, SEPT11, SLC25A36, TACSTD2, Unassigned (helicase), (Table 5) that are expressed at characteristic levels by cumulus cells associated with (surrounding) oocytes and are correlated with the competence of a mammalian oocyte for fertilization and/or implantation.

[0108] As described herein the inventors have determined as set of genes expressed in cumulus cells that are biomarkers for with the competence of a mammalian oocyte for fertilization and/or implantation. They demonstrated that genes expression profile of cumulus cells which surrounds oocyte correlated to different competence of a mammalian oocyte, allowing the identification of a oocytes suitable for fertilization and/or implantation (e.g., oocytes with normal karyotype, absent any chromosomal abnormalities, e.g., aneuploidy). The methods described herein comprise the analysis of cumulus cells surrounding the oocyte as a rapid, non-invasive approach for oocyte selection.

[0109] The set of predictive genes in Tables 2 and 3 and the 14 gene set identified in Table 5 are known human genes. However, the expression of these genes (on cumulus cells) had not heretofore been correlated to oocyte competency or embryo development. Therefore, this invention relates to a method for selecting a competent oocyte, comprising a step of measuring the expression level of specific genes in a cumulus cell surrounding said oocyte, wherein said genes include at least one nucleic acid that encodes SPSB2 and TP53I3 or polypeptide encoded thereby and optionally another at least one of the genes listed in Table 1 and 2 or the 14 genes selected from the group consisting of B3GALNT2, C22orf29, CCL16, DCBLD1, DCC1, DHX9, OTUD5, RBBP6, SEPT11, SLC25A36, TACSTD2, Unassigned (helicase).

[0110] The methods of the invention may further comprise a step consisting of comparing the expression level of the genes in the sample with a control, wherein detecting differential in the expression level of the genes between the sample and the control is indicative whether the oocyte is competent. The control may consist in sample comprising cumulus cells associated with a competent oocyte or in a sample comprising cumulus cells associated with an unfertilized oocyte.

[0111] The method of evaluating the competence of a mammalian oocyte for implantation described herein may comprise determining the level of marker expression of determining the level of marker expression of at least one nucleic acid that encodes SPSB2 and TP53I3 or polypeptide encoded thereby and optionally another at least one gene selected from the group consisting of B3GALNT2, C22orf29, CCL16, DCBLD1, DCC1, DHX9, OTUD5, RBBP6, SEPT11, SLC25A36, TACSTD2, Unassigned (helicase), in a sample; and comparing the level of marker expression in the sample with a control or reference standard, wherein detecting differential marker expression between the sample and the control is indicative of the competence of the oocyte for implantation.

[0112] The methods of evaluating the competence of a mammalian oocyte for fertilization may comprise determining the level of marker expression of determining the level of marker expression of at least one nucleic acid that encodes SPSB2 and TP53I3 or polypeptide encoded thereby and optionally another at least one gene selected from the group consisting of B3GALNT2, C22orf29, CCL16, DCBLD1, DCC1, DHX9, OTUD5, RBBP6, SEPT11, SLC25A36, TACSTD2, Unassigned (helicase), in a sample; and comparing the level of marker expression in the sample with a control or reference standard, wherein detecting differential marker expression between the sample and the control is indicative of the competence of the oocyte for implantation (e.g., absence of chromosomal abnormalities). The sample for use in the methods described herein may be derived from a cumulus cell, an oocyte, and/or a polar body. Further, the sample may be a nucleic acid sample (e.g., cDNA, mRNA) or an amino acid sample (e.g., proteins).

[0113] The methods of the invention are applicable preferably to human women but may be applicable to other mammals (e.g., primates, dogs, cats, pigs, cattle, sheep, goats, llamas).

### Cumulus Cells

[0114] Cumulus cells (CCs) are specialized granulosa cells surrounding and nourishing the oocyte. These cells surround the fully-grown oocyte to form a cumulus-oocyte complex. Cumulus cells provide key products for the acquisition of developmental competence and differ from granulosa cells in their hormonal responses and growth factors they produce. The absence or insufficient numbers of cumulus cells impairs embryo production. For example, denuded oocytes in culture cannot undergo normal fertilization and development. Cumulus cells are required for the successful maturation of oocytes and also for fertilization. These cells synthesize an abundant mucoelastic extracellular matrix, which promotes oocyte extrusion from the follicle, a 20-40 fold increase in the volume of the cumulus mass, and probably also functions as a selective barrier for sperm. Salustri (2000) Int J Dev Biol. 44(6): 591-7. For cellular and molecular events during oocyte maturation and the formation of the extracellular matrix of the cumulus-oocyte complex. See also Russell and Salustry (2006) Semin Reprod Med. 24(4): 217-27 and Kimura, et al. (2007) Soc Reprod Fertil Suppl. 63: 327-42.

[0115] Cumulus cells show high expression of many enzymes of the glycolytic pathway and also neutral amino acid transporters. Their expression is promoted by paracrine factors secreted by oocytes [Eppig, et al. (2005) Biol Reprod. 73(2): 351-7 & Sugiura, et al. (2005) Dev Biol. 279(1): 20-301, which themselves are unable to take up L-alanine and poorly metabolize glucose for energy production and thus depend on cumulus cells for their provision. Biggers, et al. (1967) Proc Natl Acad Sci USA 58(2): 560-7; Colonna & Mangia (1983) Biol Reprod. 28(4): 797-803; Donahue and Stern (1968) J Reprod Fertil. 17(2): 395-8; Eppig, et al. (2005) Biol Reprod. 73(2): 351-7; Haghighat & Van Winkle (1990) J Exp Zool. 253(1): 71-82; Leese & Barton (1984) J Reprod Fertil. 72(1): 9-13; Leese & Barton J Exp Zool. (1985) 234(2): 231-6. Cumulus cell metabolic pathways, particularly glycolysis and cholesterol biosynthesis (Su, et al. (2008) Development 135(1): 111-21), are highly affected by mutations in two key protein growth factors derived from oocytes, BMP15 and GDF9. Juengel & McNatty (2005) Hum Reprod Update 11(2): 143-160.

[0116] The inventors investigated the origin of meiotic errors in oogenesis and identified novel molecular markers of aneuploidy that may be utilized for non-invasive screening, including in cumulus cells. Gene expression has a fundamental role in the regulation of virtually every aspect of cellular life. Analysis of gene expression can therefore give an indication of the various processes occurring within a cell, and may reveal the basis of biological problems, and provide information concerning viability. Wells, et al. (2005) Hum Reprod 20: 1339-1348. The fact that cumulus cells share the same follicular environment as the oocyte and are in close communication with it via gap junctions, thus the analysis of cumulus cells transcriptional activity may reveal information about the viability of the oocyte with which they are associated.

[0117] Moreover, cumulus cells can easily be collected without compromising the oocyte, allowing for non-invasive assays of oocyte competence by examining cumulus cells. The presence of a chromosome error in the oocyte may affect the levels of gene expression and protein production in the surrounding cumulus cells. Further, an inappropriate follicular environment could predispose to chromosome errors in the oocyte. This altered environment leaves a characteristic transcriptional footprint in the cumulus cells. The inventors surprisingly discovered that novel non-invasive markers of aneuploidy and general oocyte physiology and competence may be found in cumulus cells.

### Methods of Measuring Oocyte Competence

[0118] The present invention provides a method of distinguishing oocytes and embryos more likely to experience successful fertilization and implantation from oocytes and embryos less likely to experience successful fertilization and implantation by the analysis of marker expression in cumulus cells. In one embodiment, the method is non-invasive and the oocytes or embryos identified as more likely to experience successful fertilization and implantation remain viable for implantation. In one embodiment, the method is non-damaging and the oocytes or embryos identified as more likely to experience successful fertilization and implantation remain viable for implantation.

[0119] Oogenesis is a complex process that starts during early fetal development and oocytes arrest at prophase of meiosis I. Oocytes resume development at puberty in response to gonadotropic hormones and one oocyte is ovulated each month. The monthly cycles continue until menopause and oocytes provide foundations for early preimplantation development. Further, Oocyte mRNA and proteins support embryo until genome activation

[0120] For oocyte selection in the IVF lab, the object is to select a competent oocyte that is able to mature—cytoplasm and nucleus; able to undergo fertilization; able to support embryonic development; and able to lead to a successful pregnancy and birth. Typical oocyte selection criteria in IVF labs is done based on morphological assessment but there are problems with this approach including that oocyte competency cannot be predicted by morphology and aneuploidy cannot be screened through morphology.

[0121] Aneuploidy is frequent in humans, leading to high mental retardation and miscarriage rates. Most aneuploidies arise during oogenesis and there is a close relationship between female age and oocyte aneuploidy.

[0122] Preimplantation Genetic Screening includes the cytogenetic analysis of polar bodies, blastomeres, trophectoderm (TE) samples. Although these screening methods are effective, the invasive nature of biopsy might impact embryo viability. Fragouli, et al. (2006) Hum reprod 21: 2319-2328; Goossens, et al. (2008) Hum Reprod. 23(12): 2629-45; Fragouli, et al. (2010) Fertil. Steril 94: 875-887. Accordingly, the methods described herein provide a non-invasive assessment of oocytes or embryos with information on chromosome ploidy, competence, and implantation potential.

[0123] The inventors surprisingly discovered that cumulus cells may be used in pre-implantation genetic screening to assess chromosome ploidy, competence, and implantation potential of oocytes which they surround. The inventors found that events happening at pre-ovulatory stage in cumulus-oocyte complex of critical importance for maturation, fertilization and embryo competence. The cumulus cells are generated by granulosa cells and the cumulus cell layers surround oocyte in antral follicles. The bi-directional communication between oocyte and cumulus cells via gap junctions allows for a continuous exchange of proteins and metabolites. The inventors discovered that oocyte aneuploidy affects cumulus cell gene expression and that cumulus cells may be used for the non-invasive assessment of oocyte aneuploidy and general quality.

[0124] The inventors used arrays and real-time PCR to conduct a comprehensive analysis of cumulus cell transcriptome allowing for an insight into follicular microenvironment of aneuploid oocytes. Aneuploid oocytes are associated with transcriptionally quiescent and less proliferative cumulative cells. Further, the abnormal expression of genes regulating metabolism, cell-cell communication, hypoxia, and apoptosis was found. Thus there is a relationship between follicular microenvironment and oocyte aneuploidy. In particular, fourteen genes are useful targets for non-invasive test development. For example, the SPSB2 gene (e.g., UniProtKB Q99619) expression in cumulus cells correlated with oocyte chromosome status and potential to lead to live birth.

[0125] For example, the following biological processes affected in cumulus cells of aneuploid oocytes (with corresponding genes) in Table 1.

TABLE 1
Biological Process Affected In Cumulus Cells of aneuploid oocytes with
corresponding genes that are differentially expressed

| Biological Process | Gene |
|---|---|
| Cell Adhesion | DCBLD1 |
| Cell communication | DCBLD1; SPSB2; CCL16; TACSDT2 |
| Cell cycle | OTUD5; DCCl; Septin 11 |
| Cellular processes | OTUD5; DCLBD1; SPSB2; CCL16; |
| | TACSDT2; DCC1; C22orf29; Unassigned |
| | (Helicase) |
| Developmental processes | OTUD5; DCLBD1 |
| Homeostatic processes | CCL16 |
| Immune system processes | DCLBD1; CCL16 |
| Metabolic processes | B3GALNT2; DCBLD1; SLC25A36; |
| | RBBP6; DSCC1; DHX9; Unassigned |
| | (Helicase) |
| Response to stimulus | DCBLD1; CCL16 |
| System processes | DCBLD1 |
| Transport | DCBLD1; SLC25A36 |

[0126] In one embodiment, the assessment of marker expression in oocytes, cumulus cells, follicular fluid, or culture medium is used to assess the competence of an oocyte for implantation. The assessment may be performed before implantation, to assist in maximizing the implantation of chromosomally normal embryos or to assist in minimizing the implantation of chromosomally abnormal embryos.

[0127] In one embodiment, the assessment of marker expression in oocytes, cumulus cells, follicular fluid, or culture medium is used to assess the competence of an oocyte for fertilization. The assessment may be performed before fertilization, to assist in maximizing the generation of chromosomally normal embryos or to assist in minimizing the generation of chromosomally abnormal embryos.

[0128] In one embodiment, the assessment of marker expression in oocytes, cumulus cells, follicular fluid, or culture medium is used to assess the quality of an oocyte for fertilization, implantation or long-term storage for later use by, for example, freezing.

[0129] In one embodiment, the products of differentially expressed markers are used for in vitro assessment of oocyte aneuploidy. In one embodiment, markers, gene products, RNA, proteins, and metabolites are assessed in follicular fluid, cumulus cells, polar bodies, oocytes, embryos or culture media in which the oocytes, cumulus cells, or embryos are cultured.

[0130] In one aspect, the markers displaying differential expression are used to diagnose chromosome abnormality. The assessment of marker expression in oocytes or cumulus cells is used to optimize methods for ovarian stimulation. The assessment of marker expression in oocytes or cumulus cells is also used to modify or optimize an in vitro maturation medium. Further, the assessment of marker expression in oocytes or cumulus cells is used to assay the effects of toxicants on human oocytes.

[0131] Preferably, the oocytes, cumulus cells, and embryos are human. However, the oocytes, cumulus cells, and embryos may be obtained from other non-human animals, preferably, domesticated animals including but not limited to livestock (e.g., cows, cattle, horses, camels, pigs, goats, sheep, llamas).

[0132] The assessment of marker expression in oocytes or cumulus cells may be used to assist the proper function of affected gene expression pathways by modifying the levels of components in culture media to, for example, optimize ovarian stimulation.

[0133] The assessment of marker expression in oocytes or cumulus cells may be used to guide the design of culture media, which supports proper chromosome segregation and minimizes chromosome/chromatid imbalance to, for example, optimize ovarian stimulation.

[0134] The assessment of marker expression in oocytes or cumulus cells may be used, for example, to guide the design of dietary supplements, to reduce the chance of abnormal oocytes being formed, to improve fertility, to increase the number of years that a female remains fertile, and to reduce the risk of chromosomal conditions such as, for example, Down syndrome (Trisomy 21).

[0135] The invention contemplates the use of methods for the identification of differentially expressed markers of chromosome normality and abnormality and differentially expressed markers of oocyte competence and incompetence, as well as methods for the detection of the expression products of differentially expressed markers of chromosome normality and abnormality and differentially expressed markers of oocyte competence and incompetence.

[0136] The invention contemplates the identification of differentially expressed markers by whole genome nucleic acid microarray, to identify markers differentially expressed between oocytes competent for implantation and oocytes not competent for implantation. The invention further contemplates using methods known to those skilled in the art to detect and to measure the level of differentially expressed marker expression products, such as RNA and protein, to measure the level of one or more differentially expressed marker expression products in an oocyte, as well as follicular fluid, cumulus cells, and culture medium associated with an oocyte, to evaluate the chromosomal and genetic competence of the oocyte and its potential for implantation.

[0137] The practice of the present invention may employ, unless otherwise indicated, conventional techniques and descriptions of organic chemistry, polymer technology, molecular biology (including recombinant techniques), cell biology, biochemistry, and immunology, which are within the skill of the art. Such conventional techniques include polymer array synthesis, hybridization, ligation, and detection of hybridization using a label. Specific illustrations of suitable techniques can be had by reference to the example herein below. However, other equivalent conventional procedures can, of course, also be used. Such conventional techniques and descriptions can be found in standard laboratory manuals such as Genome Analysis: A Laboratory Manual Series (Vols. I-IV), Using Antibodies: A Laboratory Manual, Cells: A Laboratory Manual, PCR Primer: A Laboratory Manual, and Sambrook, et al. (2001) Molecular Cloning: A Laboratory Manual (2^{nd} Ed.) Cold Spring Harbor Laboratory Press); Stryer (1995) Biochemistry (4^{th} Ed.) Freeman; Herdewijn (2005) Oligonucleotide Synthesis Methods and Applications Humana Press, Inc.; Nelson & Cox (2008) Lehninger Principles of Biochemistry (5^{th} Ed) W.H. Freeman; and Berg, et al. (2006) Biochemistry (6^{th} Ed.) W.H. Freeman.

[0138] Nucleic acid arrays that are useful in the present invention include arrays such as those commercially available from Affymetrix (Santa Clara, Calif.), and from Applied Biosystems (Foster City, Calif.), and from Agilent Technologies (Santa Clara, Calif.).

[0139] The present invention also contemplates sample preparation methods in certain embodiments. Prior to or concurrent with marker expression analysis, the expression product sample may be amplified using a variety of mechanisms, some of which may employ PCR. See, for example, Erlich (Ed.) (1994) PCR Technology: Principles and Applications for DNA Amplification Freeman Press; Bartlett & Stirling (Ed.) (2003) PCR Protocols Humana Press; Mattila, et al. (1991) Nucleic Acids Res. 19: 4967; Eckert et al., PCR Methods and Applications 1, 17 (1991); PCR (Eds. McPherson et al., IRL Press, Oxford); and U.S. Pat. Nos. 4,683,202, 4,683,195, 4,800,159, 4,965,188, and 5,333,675.

[0140] Other suitable amplification methods include the ligase chain reaction (LCR) (for example, Wu & Wallace (1989) Genomics 4: 560, Landegren, et al. (1988) Science 241: 1077 and Barringer, et al. (1990) Gene 89: 117), transcription amplification (Kwoh, et al. (1989) Proc. Natl. Acad. Sci. USA 86: 1173 and WO 88/10315), self-sustained sequence replication (Guatelli, et al. (1990) Proc. Nat. Acad. Sci. USA 87: 1874 and WO 90/06995), selective amplification of target polynucleotide sequences (U.S. Pat. No. 6,410,276), consensus sequence primed PCR (CP-PCR) (U.S. Pat. No. 4,437,975), arbitrarily primed PCR (AP-PCR) (U.S. Pat. Nos. 5,413,909 and 5,861,245), degenerate oligonucleotide primed PCR (DOP-PCR) (Wells, et al. (1999) Nuc Acids Res 27: 1214-1218) and nucleic acid based sequence amplification (NABSA). See U.S. Pat. Nos. 5,409,818; 5,554,517; and 6,063,603. Other amplification methods that may be used are described in, U.S. Pat. Nos. 5,242,794, 5,494,810, 4,988,617; and 6,582,938.

[0141] Additional methods of sample preparation and techniques for reducing the complexity of a nucleic sample are described in Dong, et al. (2001) Genome Research 11: 1418, in U.S. Pat. Nos. 6,361,947, 6,391,592; and 6,872,529, U.S. Patent Application Publication 2003/0096235 and 2003/0082543.

[0142] Methods for conducting polynucleotide hybridization assays, for example, but not limited to northern blots, southern blots, and nucleic acid microarrays, have been developed in the art. Hybridization assay procedures and conditions will vary depending on the application and are selected in accordance with the general binding methods known including those referred to in: Sambrook, et al. (2001) Molecular Cloning: A Laboratory Manual (2^{nd} Ed.) Cold Spring Harbor Laboratory Press; Berger and Kimmel Methods in Enzymology, Vol. 152, Guide to Molecular Cloning Techniques (Academic Press, Inc., San Diego, Calif., 1987); Young and Davism, P.N.A.S, 80: 1194 (1983). Methods and apparatus for carrying out repeated and controlled hybridization reactions have been described in U.S. Pat. Nos. 5,871,928, 5,874,219, 6,045,996 and 6,386,749, 6,391,623.

[0143] The present invention also contemplates signal detection of hybridization between ligands in certain preferred embodiments. See U.S. Pat. Nos. 5,143,854, 5,578,832; 5,631,734; 5,834,758; 5,936,324; 5,981,956; 6,025,601; 6,141,096; 6,185,030; 6,201,639; 6,218,803; and 6,225,625; 7,689,022; and WO 99/47964.

[0144] Methods and apparatus for signal detection and processing of intensity data are disclosed in, for example, U.S. Pat. Nos. 5,143,854, 5,547,839, 5,578,832, 5,631,734, 5,800,992, 5,834,758; 5,856,092, 5,902,723, 5,936,324, 5,981,956, 6,025,601, 6,090,555, 6,141,096, 6,185,030, 6,201,639; 6,218,803; 6,225,625; 7,689,022; 7,317,415; and WO 99/47964.

[0145] The practice of the present invention may also employ software and systems. Computer software products of the invention typically include computer readable medium having computer-executable instructions for performing the logic steps of the method of the invention. Suitable computer readable medium include floppy disk, CD-ROM/DVD/DVD-ROM, hard-disk drive, flash memory, ROM/RAM, magnetic tapes and etc. The computer executable instructions may be written in a suitable computer language or combination of several languages. Basic computational biology methods are described in, for example Setubal and Meidanis et al., Introduction to Computational Biology Methods (PWS Publishing Company, Boston, 1997); Salzberg, Searles, Kasif, (Ed.), Computational Methods in Molecular Biology, (Elsevier, Amsterdam, 1998); Rashidi and Buehler, Bioinformatics Basics: Application in Biological Science and Medicine (CRC Press, London, 2000) and Ouelette and Bzevanis Bioinformatics: A Practical Guide for Analysis of Gene and Proteins (Wiley & Sons, Inc., 2.sup.nd ed., 2001). See U.S. Pat. No. 6,420,108.

[0146] The present invention may also make use of various computer program products and software for a variety of purposes, such as probe design, management of data, analysis, and instrument operation. See U.S. Pat. Nos. 5,593,839, 5,795,716, 5,733,729, 5,974,164, 6,066,454, 6,090,555, 6,185,561, 6,188,783, 6,223,127, 6,229,911 and 6,308,170. Additionally, the present invention may have preferred embodiments that include methods for providing genetic information over networks such as the Internet as shown in U.S. Patent Application Publication Nos. 2003/0100995; 2003/0120432; 2004/0002818; 2004/0126840; 2004/0049354; 2003/0097222; 20020183936.

[0147] Throughout this disclosure, various aspects of this invention can be presented in a range format. It should be understood that the description in range format is merely for convenience and brevity and should not be construed as an inflexible limitation on the scope of the invention. Accordingly, the description of a range should be considered to have specifically disclosed all the possible subranges as well as individual numerical values within that range. For example, description of a range such as from 1 to 6 should be considered to have specifically disclosed subranges such as from 1 to 3, from 1 to 4, from 1 to 5, from 2 to 4, from 2 to 6, from 3 to 6 etc., as well as individual numbers within that range, for example, 1, 2, 3, 4, 5, and 6. This applies regardless of the breadth of the range.

### Methods of Detection

[0148] Means of detecting such labels are well known to those of skill in the art. Thus, for example, radiolabels may be detected using photographic film or scintillation counters; fluorescent markers may be detected using a photodetector to detect emitted light. Enzymatic labels are typically detected by providing the enzyme with a substrate and detecting the reaction product produced by the action of the enzyme on the substrate, and calorimetric labels are detected by simply visualizing the colored label.

[0149] A variety of immunoassay formats, including competitive and non-competitive immunoassay formats, antigen capture assays, enzyme immunoassay (EIA), radioimmunoassay (RIA), counting immunoassay (CIA), immunoenzymoetric assay (IEMA), chemiluminescent immunoassay (CLIA), ELISA, LIA (luminescent immunoassay), fluorescent immunoassay, two-antibody sandwich assays, and three-antibody sandwich assays are useful methods of the invention. Self, et al. (1996) Curr. Opin. Biotechnol. 7: 60-65 and David Wild [Ed.] (2008) The Immunoassay Handbook (3^{rd} Ed.) The invention should not be construed to be limited to any one type of immunoassay.

[0150] In one embodiment, the method of the invention relies on one or more antigen capture assays. In one such antigen capture assay, antibody is bound to a solid support, and sample is added such that antigen is bound by the antibody. After unbound proteins are removed by washing, the amount of bound antigen can be quantified, if desired, using, for example, but not limited to, a radioassay. Harlow & Lane (1999) Using Antibodies: A Laboratory Manual Cold Spring Harbor Laboratory Press.

[0151] Enzyme-linked immunosorbent assays (ELISAs) are useful in the methods of the invention. An enzyme such as, but not limited to, horseradish peroxidase (HRP), alkaline phosphatase (AP), beta-galactosidase or urease can be linked, for example, to an antigen antibody or to a secondary antibody for use in a method of the invention. A horseradish-peroxidase detection system may be used, for example, with the chromogenic substrate tetramethylbenzidine (TMB), which yields a soluble product in the presence of hydrogen peroxide that is detectable at 450 nm. Other convenient enzyme-linked systems include, for example, the alkaline phosphatase detection system, which may be used with the chromogenic substrate p-nitrophenyl phosphate to yield a soluble product readily detectable at 405 nm. Similarly, a beta-galactosidase detection system may be used with the chromogenic substrate o-nitrophenyl-beta-D-galactopyranoside (ONPG) to yield a soluble product detectable at 410 nm. Alternatively, a urease detection system may be used with a substrate such as urea-bromocresol purple (Sigma Immunochemicals, St. Louis, Mo.) Useful enzyme-linked primary and secondary antibodies can be obtained from any number of commercial sources.

[0152] Chemiluminescent detection is also useful for detecting antigen or for determining a quantity of antigen according to a method of the invention. Chemiluminescent secondary antibodies may be obtained from any number of commercial sources. Fluorescent detection is also useful for detecting antigen or for determining a level of antigen in a method of the invention. Useful fluorochromes include, but are not limited to, DAPI, fluorescein, Hoechst 33258, R-phycocyanin, B-phycoerythrin, R-phycoerythrin, rhodamine, Texas red and lissamine-Fluorescein- or rhodamine-labeled antigen-specific antibodies.

[0153] Radioimmunoassays (RIAs) are also useful in the methods of the invention. Such assays are well known in the art, and are described for example in Brophy, et al. (1990) Biochem. Biophys. Res. Comm. 167: 898-903 and Guechot, et al. (1996) Clin. Chem. 42: 558-563 and Surhone, et al. (Eds.) Radioimmunassay (2010) VDM Verlag. Radioimmunoassays are performed, for example, using Iodine-125-labeled primary or secondary antibody. Harlow & Lane (1999) Using Antibodies: A Laboratory Manual Cold Spring Harbor Laboratory Press.

[0154] A signal emitted from a detectable antibody is analyzed, for example, using a spectrophotometer to detect color from a chromogenic substrate; a radiation counter to detect radiation, such as a gamma counter for detection of Iodine-125; or a fluorometer to detect fluorescence in the presence of light of a certain wavelength. Where an enzyme-linked assay is used, quantitative analysis of the amount of antigen is performed using a spectrophotometer. It is understood that the assays of the invention can be performed manually or, if desired, can be automated and that the signal emitted from multiple samples can be detected simultaneously in many systems available commercially.

[0155] The methods of the invention also encompass the use of capillary electrophoresis based immunoassays (CEIA), which can be automated, if desired. Immunoassays also may be used in conjunction with laser-induced fluorescence as described, for example, in Schmalzing, et al. (1997) Electrophoresis 18: 2184-2193 and Bao (1997) J. Chromatogr. B. Biomed. Sci. 699: 463-480. Liposome immunoassays, such as flow-injection liposome immunoassays and liposome immunosensors, may also be used to detect antigen according to the methods of the invention. See Rongen, et al. (1997) J. Immunol. Methods 204: 105-133. See also Walid (Ed.) The Immunoassay Handbook (3^{rd} Ed.) (2005) Elsevier Ltd.

[0156] Sandwich enzyme immunoassays may also be useful in the methods of the invention. In a two-antibody sandwich assay, a first antibody is bound to a solid support, and the antigen is allowed to bind to the first antibody. The amount of antigen is quantified by detecting and measuring the amount of a detectable second antibody that binds to the complex of the antigen and the first antibody. In a three-antibody sandwich assay, a first antibody is bound to a solid support, and the antigen is allowed to bind to the first antibody. Then a second antibody is added and is allowed to bind to the antigen, which is bound to the first antibody. The amount of antigen is quantified by detecting and measuring the amount of a detectable third antibody that binds to the second antibody.

[0157] Quantitative western blotting may also be used to detect antigen or to determine a level of antigen in a method of the invention. Western blots are quantified using well known methods such as scanning densitometry. Parra, et al. (1998) J. Vasc. Surg. 28: 669-675. Fluorescence activated cell sorting (FACS) analysis may also be used to detect antigen or to determine the level of antigen in a method of the invention. Using FACS analysis, cells may be stained with one or more fluorescent dyes specific to cell components of interest, and fluorescence of each cell is measured as it rapidly transverses the excitation beam (laser or mercury arc lamp).

[0158] Fluorescence provides a quantitative measure of various biochemical and biophysical properties of the cell, as well as a basis for cell sorting. Other measurable optical parameters include light absorption and light scattering, the latter being applicable to the measurement of cell size, shape, density, granularity, and stain uptake. See Darzynkiewicz, et al. (2004) Cytometry: New Developments (4^{th} Ed.) Elsevier Academic Press.

[0159] The presence of the protein can be detected using standard electrophoretic and immunodiagnostic techniques, including immunoassays such as competition, direct reaction, or sandwich type assays. Such assays include, but are not limited to, Western blots; agglutination tests; enzyme-labeled and mediated immunoassays, such as ELISAs; biotin/avidin type assays; radioimmunoassays; immunoelectrophoresis; immunoprecipitation, etc. The reactions generally include revealing labels such as fluorescent, chemiluminescent, radioactive, enzymatic labels or dye molecules, or other methods for detecting the formation of a complex between the antigen and the antibody or antibodies reacted therewith.

[0160] The aforementioned assays generally involve separation of unbound protein in a liquid phase from a solid phase support to which antigen-antibody complexes are bound. Solid supports which can be used in the practice of the invention include substrates such as nitrocellulose (e.g., in membrane or microtitre well form); polyvinylchloride (e.g., sheets or microtitre wells); polystyrene latex (e.g., beads or microtitre plates); polyvinylidine fluoride; diazotized paper; nylon membranes; activated beads, magnetically responsive beads, and the like. More particularly, an ELISA method can be used, wherein the wells of a microtiter plate are coated with an antibody against the protein to be tested. A biological sample containing or suspected of containing the marker protein is then added to the coated wells. After a period of incubation sufficient to allow the formation of antibody-antigen complexes, the plate (s) can be washed to remove unbound moieties and a detectably labeled secondary binding molecule added. The secondary binding molecule is allowed to react with any captured sample marker protein, the plate washed and the presence of the secondary binding molecule detected using methods well known in the art.

[0161] Alternatively an immunohistochemistry (IHC) method may be preferred. IHC specifically provides a method of detecting targets in a sample or tissue specimen in situ. The overall cellular integrity of the sample is maintained in IHC, thus allowing detection of both the presence and location of the targets of interest. Typically a sample is fixed with formalin, embedded in paraffin and cut into sections for staining and subsequent inspection by light microscopy. Current methods of IHC use either direct labeling or secondary antibody-based or hapten-based labeling. Examples of known IHC systems include, for example, EnVision® (DakoCytomation), Powervision® (Immunovision, Springdale, Ariz.), the NBA® kit (Zymed Laboratories Inc., South San Francisco, Calif.), HistoFine® (Nichirei Corp, Tokyo, Japan).

[0162] In particular embodiment, a tissue section (e.g. a sample comprising cumulus cells) may be mounted on a slide or other support after incubation with antibodies directed against the proteins encoded by the genes of interest. Then, microscopic inspections in the sample mounted on a suitable solid support may be performed. For the production of photomicrographs, sections comprising samples may be mounted on a glass slide or other planar support, to highlight by selective staining the presence of the proteins of interest.

[0163] Therefore IHC samples may include, for instance: (a) preparations comprising cumulus cells (b) fixed and embedded said cells and (c) detecting the proteins of interest in said cells samples. In some embodiments, an IHC staining procedure may comprise steps such as: cutting and trimming tissue, fixation, dehydration, paraffin infiltration, cutting in thin sections, mounting onto glass slides, baking, deparaffination, rehydration, antigen retrieval, blocking steps, applying primary antibodies, washing, applying secondary antibodies (optionally coupled to a suitable detectable label), washing, counter staining, and microscopic examination.

### Nucleic Acid Amplification

[0164] Assays for amplification of the known sequence are also disclosed. For example primers for long range PCR may be designed to amplify regions of the sequence. For RNA, a first reverse transcriptase step may be used to generate double stranded DNA from the single stranded RNA. The array may be designed to detect sequences from an entire genome; or one or more regions of a genome, for example, selected regions of a genome such as those coding for a protein or RNA of interest; or a conserved region from multiple genomes; or multiple genomes, Arrays and methods of genetic analysis using arrays is described in Cutler, et al. (2001) Genome Res. 11(11): 1913-1925 and Warrington, et al. (2002) Hum Mutat 19: 402-409 and in U.S. Patent Application Publication No 2003/0124539.

[0165] Hybridization probes are oligonucleotides capable of binding in a base-specific manner to a complementary strand of nucleic acid. Such probes include peptide nucleic acids, as described in Nielsen, et al. (1991) Science 254: 1497-1500, and other nucleic acid analogs and nucleic acid mimetics. See U.S. Pat. No. 6,156,501.

[0166] The term hybridization refers to the process in which two single-stranded nucleic acids bind non-covalently to form a double-stranded nucleic acid; triple-stranded hybridization is also theoretically possible. Complementary sequences in the nucleic acids pair with each other to form a double helix. The resulting double-stranded nucleic acid is a “hybrid.” Hybridization may be between, for example to complementary or partially complementary sequences. The hybrid may have double-stranded regions and single stranded regions. The hybrid may be, for example, DNA:DNA, RNA:DNA or DNA:RNA. Hybrids may also be formed between modified nucleic acids. One or both of the nucleic acids may be immobilized on a solid support. Hybridization techniques may be used to detect and isolate specific sequences, measure homology, or define other characteristics of one or both strands.

[0167] The stability of a hybrid depends on a variety of factors including the length of complementarity, the presence of mismatches within the complementary region, the temperature and the concentration of salt in the reaction. Hybridizations are usually performed under stringent conditions, for example, at a salt concentration of no more than 1 M and a temperature of at Least 25° C. For example, conditions of 5×SPE (750 mM NaCl, 50 mM NaPhosphate, 5 mM EDTA, pH 7.4) or 100 mM MES, 1 M Na, 20 mM EDTA, 0.01% Tween-20 and a temperature of 25-50° C. are suitable for allele-specific probe hybridizations. In a particularly preferred embodiment, hybridizations are performed at 40-50° C. Acetylated BSA and herring sperm DNA may be added to hybridization reactions. Exemplary conditions for hybridization include low stringency, medium stringency, high stringency, or very high stringency conditions, which, as used herein, refers broadly to conditions for nucleic acid hybridization and washing. Guidance for performing hybridization reactions can be found in Ausubel, et al. (2002) Short Protocols in Molecular Biology (5^{th} Ed.) John Wiley & Sons, NY. Exemplary specific hybridization conditions include but are not limited to: (1) low stringency hybridization conditions in 6× sodium chloride/sodium citrate (SSC) at about 45° C., followed by two washes in 0.2×SSC, 0.1% SDS at least at 50° C. (the temperature of the washes can be increased to 55° C. for low stringency conditions); (2) medium stringency hybridization conditions in 6×SSC at about 45° C., followed by one or more washes in 0.2×SSC, 0.1% SDS at 60° C.; (3) high stringency hybridization conditions in 6×SSC at about 45° C., followed by one or more washes in 0.2×SSC, 0.1% SDS at 65° C.; and (4) very high stringency hybridization conditions are 0.5M sodium phosphate, 7% SDS at 65° C., followed by one or more washes at 0.2×SSC, 1% SDS at 65° C.

### Labels

[0168] In one embodiment, the hybridized nucleic acids are detected by detecting one or more labels attached to the sample nucleic acids. The labels may be incorporated by any of a number of means well known to those of skill in the art. In one embodiment, the label is simultaneously incorporated during the amplification step in the preparation of the sample nucleic acids. Thus, for example, PCR with labeled primers or labeled nucleotides will provide a labeled amplification product. In another embodiment, transcription amplification, as described above, using a labeled nucleotide (e.g., fluorescein-labeled UTP and/or CTP) incorporates a label into the transcribed nucleic acids. In another embodiment PCR amplification products are fragmented and labeled by terminal deoxytransferase and labeled dNTPs. Alternatively, a label may be added directly to the original nucleic acid sample (e.g., mRNA, polyA mRNA, cDNA, etc.) or to the amplification product after the amplification is completed. Means of attaching labels to nucleic acids are well known to those of skill in the art and include, for example, nick translation or end-labeling (e.g., with a labeled RNA) by kinasing the nucleic acid and subsequent attachment (ligation) of a nucleic acid linker joining the sample nucleic acid to a label (e.g., a fluorophore). In another embodiment label is added to the end of fragments using terminal deoxytransferase.

[0169] As stated above, nucleic acid and nucleic acid probes may be modified post-translationally to add effector moieties such as chemical linkers, detectable moieties such as for example fluorescent dyes, enzymes, substrates, bioluminescent materials, radioactive materials, and chemiluminescent moieties, or functional moieties such as for example streptavidin, avidin, biotin, a cytotoxin, a cytotoxic agent, and radioactive materials.

[0170] The nucleic acid and nucleic acid probes described herein may be modified post-translationally to add effector moieties such as chemical linkers, detectable moieties such as for example fluorescent dyes, enzymes, substrates, bioluminescent materials, radioactive materials, chemiluminescent moieties, a cytotoxic agent, radioactive materials, or functional moieties.

[0171] A wide variety of entities, e.g., ligands, may be coupled to the oligonucleotides as known in the art. Ligands may include naturally occurring molecules, or recombinant or synthetic molecules. Exemplary ligands include, but are not limited to, avadin, biotin, peptides, peptidomimetics, polylysine (PLL), polyethylene glycol (PEG), mPEG, cationic groups, spermine, spermidine, polyamine, thyrotropin, melanotropin, lectin, glycoprotein, surfactant protein A, mucin, glycosylated polyaminoacids, transferrin, aptamer, immunoglobulins (e.g., antibodies), insulin, transferrin, albumin, sugar, lipophilic molecules (e.g., steroids, bile acids, cholesterol, cholic acid, and fatty acids), vitamin A, vitamin E, vitamin K, vitamin B, folic acid, B12, riboflavin, biotin, pyridoxal, vitamin cofactors, lipopolysaccharide, hormones and hormone receptors, lectins, carbohydrates, multivalent carbohydrates, radiolabeled markers, fluorescent dyes, and derivatives thereof. See, e.g., U.S. Pat. Nos. 6,153,737; 6,172,208; 6,300,319; 6,335,434; 6,335,437; 6,395,437; 6,444,806; 6,486,308; 6,525,031; 6,528,631; and 6,559, 279.

[0172] Additionally, moieties may be added to the antigen or epitope to increase half-life in vivo (e.g., by lengthening the time to clearance from the blood stream. Such techniques include, for example, adding PEG moieties (also termed pegilation), and are well-known in the art.

[0173] A nucleic acid and nucleic acid probes described herein may be “attached” to a substrate when it is associated with the solid label through a non-random chemical or physical interaction. The attachment may be through a covalent bond. However, attachments need not be covalent or permanent. Materials may be attached to a label through a “spacer molecule” or “linker group.” Such spacer molecules are molecules that have a first portion that attaches to the biological material and a second portion that attaches to the label. Thus, when attached to the label, the spacer molecule separates the label and the biological materials, but is attached to both. Methods of attaching biological material (e.g., label) to a label are well known in the art, and include but are not limited to chemical coupling.

### Detectable Labels

[0174] For example, detectable labels suitable for use in the present invention include any composition detectable by spectroscopic, photochemical, biochemical, immunochemical, electrical, optical or chemical means. The nucleic acid and nucleic acid probes described herein may be modified post-translationally to add effector labels such as chemical linkers, detectable labels such as for example fluorescent dyes, enzymes, substrates, bioluminescent materials, radioactive materials, and chemiluminescent labels, or functional labels such as for example streptavidin, avidin, biotin, a cytotoxin, a cytotoxic agent, and radioactive materials. Further exemplary enzymes include, but are not limited to, horseradish peroxidase, acetylcholinesterase, alkaline phosphatase, β-galactosidase and luciferase. Further exemplary fluorescent materials include, but are not limited to, rhodamine, fluorescein, fluorescein isothiocyanate, umbelliferone, dichlorotriazinylamine, phycoerythrin and dansyl chloride. Further exemplary chemiluminescent labels include, but are not limited to, luminol. Further exemplary bioluminescent materials include, but are not limited to, luciferin and aequorin. Further exemplary radioactive materials include, but are not limited to, hydrogen-3 (³H), bismuth-213 (²¹³Bs), carbon-14 (¹⁴C), carbon-¹¹C) chlorine-18 (Cl¹⁸), chromium-51, (⁵¹Cr), cobalt-57 (⁵⁷Co), cobalt-60 (⁶⁰Co), copper-64 (⁶⁴Cu), copper-67 (⁶⁷Cu), dysprosium-165 (¹⁶⁵Dy), erbium-169 (¹⁶⁹Er), fluorine-18 (¹⁸F), gallium-67 (⁶⁷Ga), gallium-68 (⁶⁸Ga), germanium-68 (⁶⁸Ge), holmium-166 (¹⁶⁶Ho), indium-111 (¹¹¹In), iodine-125 (¹²⁵I), iodine-123 (¹²⁴I), iodine-124 (¹²⁴I), iodine-131 (¹³¹I), iridium-192 (¹⁹²Ir), iron-59 (⁵⁹Fe), krypton-81 (⁸¹Kr), lead-212 (²¹²Pb), lutetium-177 (¹⁷⁷Lu), molybdenum-99 (⁹⁹Mo), nitrogen-13 (¹³N), oxygen-15 (¹⁵O), palladium-103 (¹⁰³Pd), phosphorus-32 (³²P), potassium-42 (⁴²K), rhenium-186 (¹⁸⁶Re), rhenium-188 (¹⁸⁸Re), rubidium-81 (⁸¹Rb), rubidium-82 (⁸²Rb), samarium-153 (¹⁵³Sm), selenium-75 (⁷⁵Se), sodium-24 (²⁴Na), strontium-82 (⁸²Sr), strontium-89 (⁸⁹Sr), sulfur 35 (³⁵S), technetium-99m (⁹⁹Tc), thallium-201 (²⁰¹Tl), tritium (³H), xenon-133 (¹³³Xe), ytterbium-169 (¹⁶⁹Yb), ytterbium-177 (¹⁷⁷Yb), and yttrium-90 (⁹⁰Y). Further exemplary labels include but are not limited to biotin for staining with labeled streptavidin conjugate; anti-biotin antibodies, magnetic beads (e.g., Dynabeads®); fluorescent dyes (e.g., fluorescein, texas red, rhodamine, green fluorescent protein); phosphorescent labels; enzymes (e.g., horse radish peroxidase, alkaline phosphatase and others commonly used in an ELISA); and colorimetric labels such as colloidal gold or colored glass or plastic (e.g., polystyrene, polypropylene, latex) beads

[0175] Methods are known in the art for conjugating nucleic acids and nucleic acid probes described herein to a label, such as those methods described by Hermanson (2008) Bioconjugate Techniques [2^{nd} Ed.], Elsevier, Inc.; Rapley [Ed.] (2000) The Nucleic Acid Protocols Handbook Humana Press; and Symons (1989) Nucleic Acid Probes CRC Press, Inc. The use of such labels are also described, for example, in U.S. Pat. Nos. 3,817,837, 3,850,752, 3,939,350, 3,996,345, 4,277,437, 4,275,149 and 4,366,241.

### Substrates

[0176] Arrays may generally be produced using a variety of techniques, such as mechanical synthesis methods or light directed synthesis methods that incorporate a combination of photolithographic methods and solid phase synthesis methods. Techniques for the synthesis of these arrays using mechanical synthesis methods are described in, e.g., U.S. Pat. Nos. 5,384,261, and 6,040,193. Although a planar array surface is preferred, the array may be fabricated on a surface of virtually any shape or even a multiplicity of surfaces. Arrays may be nucleic acids on beads, gels, polymeric surfaces, fibers such as fiber optics, glass or any other appropriate substrate. See U.S. Pat. Nos. 5,770,358, 5,789,162, 5,708,153, 6,040,193 and 5,800,992.

[0177] Arrays may be packaged in such a manner as to allow for diagnostic use or can be an all-inclusive device; e.g., U.S. Pat. Nos. 5,856,174 and 5,922,591. Arrays are commercially available from, for example, Affymetrix (Santa Clara, Calif.) and Applied Biosystems (Foster City, Calif.), and are directed to a variety of purposes, including genotyping, diagnostics, mutation analysis, marker expression, and gene expression monitoring for a variety of eukaryotic and prokaryotic organisms. The number of probes on a solid support may be varied by changing the size of the individual features. In one embodiment the feature size is 20 by 25 microns square, in other embodiments features may be, for example, 8 by 8, 5 by 5 or 3 by 3 microns square, resulting in about 2,600,000, 6,600,000 or 18,000,000 individual probe features.

[0178] U.S. Pat. Nos. 5,800,992 and 6,040,138 describe methods for making arrays of nucleic acid probes that can be used to detect the presence of a nucleic acid containing a specific nucleotide sequence. Methods of forming high-density arrays of nucleic acids, peptides and other polymer sequences with a minimal number of synthetic steps are known. The nucleic acid array can be synthesized on a solid substrate by a variety of methods, including, but not limited to, light-directed chemical coupling, and mechanically directed coupling. For additional descriptions and methods relating to arrays. See U.S. Pat. Nos. 5,861,242, 6,027,880, 5,837,832, 6,723,503; 7,144,699; 7,300,788; WO 2003/060526; and U.S. Patent Application Publication No. 2005/0032074.

[0179] The nucleic acids and nucleic acid probes described herein may be attached to a substrate. A number of substrates (e.g., solid supports) known in the art are suitable for use with the nucleic acids and probes thereof described herein. The substrate may be modified to contain channels or other configurations. See Fung (2004) [Ed.] Protein Arrays: Methods and Protocols Humana Press and Kambhampati (2004) [Ed.] Protein Microarray Technology John Wiley & Sons.

[0180] Substrate materials include, but are not limited to acrylics, agarose, borosilicate glass, carbon (e.g., carbon nanofiber sheets or pellets), cellulose acetate, cellulose, ceramics, gels, glass (e.g., inorganic, controlled-pore, modified, soda-lime, or functionalized glass), latex, magnetic beads, membranes, metal, metalloids, nitrocellulose, NYLON®, optical fiber bundles, organic polymers, paper, plastics, polyacryloylmorpholide, poly(4-methylbutene), poly(ethylene terephthalate), poly(vinyl butyrate), polyacrylamide, polybutylene, polycarbonate, polyethylene, polyethyleneglycol terephthalate, polyformaldehyde, polymethacrylate, polymethylmethacrylate, polypropylene, polysaccharides, polystyrene, polyurethanes, polyvinylacetate, polyvinylchloride, polyvinylidene difluoride (PVDF), polyvinylpyrrolidinone, rayon, resins, rubbers, semiconductor materials, SEPHAROSE®, silica, silicon, styrene copolymers, TEFLON®, and variety of other polymers.

[0181] Substrates need not be flat and can include any type of shape including spherical shapes (e.g., beads) or cylindrical shapes (e.g., fibers). Materials attached to solid supports may be attached to any portion of the solid support (e.g., may be attached to an interior portion of a porous solid support material).

[0182] The substrate body may be in the form of a bead, box, column, cylinder, disc, dish (e.g., glass dish, PETRI dish), fiber, film, filter, microtiter plate (e.g., 96-well microtiter plate), multi-bladed stick, net, pellet, plate, ring, rod, roll, sheet, slide, stick, tray, tube, or vial. The substrate may be a singular discrete body (e.g., a single tube, a single bead), any number of a plurality of substrate bodies (e.g, a rack of 10 tubes, several beads), or combinations thereof (e.g., a tray comprises a plurality of microtiter plates, a column filled with beads, a microtiter plate filed with beads).

[0183] A nucleic acid or nucleic acid probe may be “attached” to a substrate when it is associated with the solid substrate through a non-random chemical or physical interaction. The attachment may be through a covalent bond. However, attachments need not be covalent or permanent. Materials may be attached to a substrate through a “spacer molecule” or “linker group.” Such spacer molecules are molecules that have a first portion that attaches to the biological material and a second portion that attaches to the substrate. Thus, when attached to the substrate, the spacer molecule separates the substrate and the biological materials, but is attached to both. Methods of attaching biological material (e.g., label) to a substrate are well known in the art, and include but are not limited to chemical coupling.

[0184] Plates, such as microtiter plates, which support and contain the solid-phase for solid-phase synthetic reactions may be used. Microtiter plates may house beads that are used as the solid-phase. By “particle” or “microparticle” or “nanoparticle” or “bead” or “microbead” or “microsphere” herein is meant microparticulate matter having any of a variety of shapes or sizes. The shape may be generally spherical but need not be spherical, being, for example, cylindrical or polyhedral. As will be appreciated by those in the art, the particles may comprise a wide variety of materials depending on their use, including, but not limited to, cross-linked starch, dextrans, cellulose, proteins, organic polymers including styrene polymers such as polystyrene and methylstyrene as well as other styrene copolymers, plastics, glass, ceramics, acrylic polymers, magnetically responsive materials, colloids, thoriasol, carbon graphite, titanium dioxide, nylon, latex, and TEFLON®. See e.g., “Microsphere Detection Guide” from Bangs Laboratories, Fishers, Ind.

[0185] The nucleic acids and nucleic acid probes may be attached to on any of the forms of substrates described herein (e.g., bead, box, column, cylinder, disc, dish (e.g., glass dish, PETRI dish), fiber, film, filter, microtiter plate (e.g., 96-well microtiter plate), multi-bladed stick, net, pellet, plate, ring, rod, roll, sheet, slide, stick, tray, tube, or vial). In particular, particles or beads may be a component of a gelling material or may be separate components such as latex beads made of a variety of synthetic plastics (e.g., polystyrene). The label (e.g., streptavidin) may be bound to a substrate (e.g., bead).

### Sequencing Methods

[0186] The invention also encompasses methods of sequencing of the substantially uniform nucleic acid fragments as prepared by the methods set forth herein. In one embodiment, the methods described herein may be used to prepare size fragments for paired end sequencing libraries of short insert (˜300 bases ˜100 nm pitch), long insert (˜3 kb ˜1 μm pitch), and ultralong insert (˜30 kb ˜10 μm pitch). The nucleic acid sequencing methods described herein can be automated.

[0187] Sequencing can be carried out using any suitable sequencing technique including, for example, sequencing by synthesis techniques wherein nucleotides are added successively to a free 3′ hydroxyl group, resulting in synthesis of a nucleic acid chain in the 5′ to 3′ direction. The nature of the nucleotide added is preferably determined after each nucleotide addition. Sequencing techniques using sequencing by ligation, wherein not every contiguous base is sequenced, and techniques such as massively parallel signature sequencing (MPSS) where bases are removed from, rather than added to the strands on the surface are also useful, as are techniques using detection of pyrophosphate release (pyrosequencing).

[0188] The initiation point for a sequencing reaction may be provided by annealing of a sequencing primer to a target nucleic acid present at a feature of an array. In this connection, a known adapter region that is present on a target nucleic acid, for example, a target nucleic acid from a cleavage reaction described previously herein, can be used as a priming site for annealing of a sequencing primer.

[0189] In a particular embodiment, a nucleic acid sequencing reaction can include steps of hybridising a sequencing primer to a single-stranded region of a linearised nucleic acid fragment (or amplification product thereof) that acts as a sequencing template, sequentially incorporating one or more nucleotides into a nucleic acid strand complementary to the region of the template strand to be sequenced, identifying the base present in one or more of the incorporated nucleotide(s) and thereby determining the sequence of a region of the template strand.

[0190] One preferred sequencing method which can be used in accordance with the invention relies on the use of modified nucleotides having removable 3′ blocks, for example, as described in WO 2004/018497 and U.S. Pat. No. 7,057,026. Once the modified nucleotide has been incorporated into the growing nucleic acid chain complementary to the region of the template being sequenced there is no free 3′-OH group available to direct further sequence extension and therefore the polymerase cannot add further nucleotides. This allows convenient detection of single nucleotide incorporation events. Once the identity of the base incorporated into the growing chain has been determined, the 3′ block may be removed to allow addition of the next successive nucleotide. By ordering the products derived using these modified nucleotides, it is possible to deduce the DNA sequence of the DNA template. Multiple reactions can be done in parallel on a single array, for example, if each of the modified nucleotides has a different label attached thereto, known to correspond to the particular base, thereby facilitating discrimination between the bases added during each incorporation step. If desired, a separate reaction may be carried out for each of the modified nucleotides.

[0191] Modified nucleotides used in an amplification or sequencing reaction may carry a label to facilitate their detection. A fluorescent label, for example, may be used for detection of modified nucleotides. Each nucleotide type may thus carry a different fluorescent label, for example, as described in WO 2007/135368. The detectable label need not, however, be a fluorescent label. Any label can be used which allows the detection of an incorporated nucleotide. Similarly, fluorescent labels or other labels can be used to detect any of a variety of analytes on an array fabricated using a bead-based transfer method set forth herein.

[0192] One method for detecting fluorescently labeled nucleotides comprises using laser light of a wavelength specific for the labeled nucleotides, or the use of other suitable sources of illumination. The fluorescence from the label on the nucleotide may be detected by a CCD camera or other suitable detection means. Suitable instrumentation for recording images of clustered arrays is described in WO 07/123,744. Detectors that are capable of obtaining an image of an array surface such as those configured to scan an array surface. Such detectors can be configured to take a static image of an array surface, scan a point across an array surface or scan a line across an array surface. Exemplary scanning devices that can be used are described, for example, in U.S. Pat. No. 7,329,860. A detector can be configured to obtain an image of an array at high resolution, for example, in the low micron to submicron range. In particular embodiments, an image can be obtained at a Rayleigh resolution between 0.2 and 10 micrometers.

[0193] The invention is not intended to be limited to use of the sequencing method outlined above, as a variety of sequencing methodologies which utilize successive incorporation of nucleotides into a nucleic acid chain or removal of nucleotides from a nucleic acid chain can be used. Suitable alternative techniques include, for example, Pyrosequencing, FISSEQ (fluorescent in situ sequencing), MPSS and sequencing by ligation-based methods, for example as described is U.S. Pat. No. 6,306,597. Sequencing by hybridization methods can also be used.

[0194] A nucleic acid may be analyzed to obtain a first and then a second sequencing read from opposite ends of the nucleic acid. Methodology for sequencing both ends of nucleic acids at array features (also referred to as “clusters”) are described in WO 07/010,252 and WO 08/041,002. These methods utilize a step of copying a first nucleic acid fragment (or amplicon thereof) by hybridising the 3′ end of this template strand to an immobilized primer followed by extending the resulting bridged structure to generate a second template strand. This copying step can be carried out after the template has been sequenced from a first end. Then the first strand can be cleaved from the surface and the remaining second template strand can be sequenced from the other end. In order to practice this version of the invention, two or more immobilized primers are utilized, at least one of which is configured to be cleavable in order to release the first template strand.

[0195] Sequencing can be carried out using other sequencing techniques as well including but not limited to Maxam-Gilbert method, chain-termination methods, high-throughput sequencing, Ladder-based sequencing methods, multiplex sequencing, and sequencing by hybridization. See e.g., U.S. Pat. Nos. 5,674,473; 6,296,810; 7,179,602; 7,272,507; Maxam and Gilbert (1977) Proc. Natl. Acad. Sci. USA 74: 560; Church & Kieffer-Higgins (1988) Science 240: 185-188. Suitable sequencing methods also include a nano method of sequencing as described in Lagerqvist, et al. (2006) Nano Letters 6(4): 779-782. See also Mardis (September 2008) Annual Review of Genomics and Human Genetics 9: 387-402.

[0196] Sequencing methods are preferably carried out with the target polynucleotide arrayed on a solid support as exemplified above in regard to sequencing by synthesis methods. Multiple target polynucleotides can be immobilized on the solid support through linker molecules, or can be attached to particles, e.g., microspheres, which can also be attached to a solid support material.

[0197] Sequencing methods can be carried out on both single polynucleotide molecule and multi-polynucleotide molecule arrays, e.g., arrays of distinct individual polynucleotide molecules and arrays of distinct regions comprising multiple copies of one individual polynucleotide molecule. Single molecule arrays allow each individual polynucleotide to be resolved separately. The use of single molecule arrays is preferred. Sequencing single molecule arrays non-destructively allows a spatially addressable array to be formed. Brenner, et al. (2000) Nature Biotechnology 18: 630-634; Drmanac, et al. (1992) International Journal of Genome Research 1(1):59-79. An additional technique utilizes sequencing by hybridization. For example, sequencing by hybridization has been described. Drmanac, et al. (1989) Genomics 4:114; Koster, et al. (1996) Nature Biotechnology 14: 1123; U.S. Pat. Nos. 5,525,464; 5,202,231; and 5,695,940. See also Ronaghi, et al., (1998) Science 281: 363-365; Syvanen (1999) Human Mutation 13: 1-10.

[0198] In a preferred embodiment, the expression level may be determined by determining the quantity of mRNA.

[0199] Methods for determining the quantity of mRNA are well known in the art. For example the nucleic acid contained in the samples (e.g., cell or tissue prepared from the patient) is first extracted according to standard methods, for example using lytic enzymes or chemical solutions or extracted by nucleic-acid-binding resins following the manufacturer's instructions. The extracted mRNA is then detected by hybridization (e.g., Northern blot analysis) and/or amplification (e.g., RT-PCR). Preferably quantitative or semi-quantitative RT-PCR is preferred. Real-time quantitative or semi-quantitative RT-PCR is particularly advantageous. Other methods of amplification include ligase chain reaction (LCR), transcription-mediated amplification (TMA), strand displacement amplification (SDA) and nucleic acid sequence based amplification (NASBA).

[0200] Nucleic acids having at least 10 nucleotides and exhibiting sequence complementarity or homology to the mRNA of interest herein find utility as hybridization probes or amplification primers. It is understood that such nucleic acids need not be identical, but are typically at least about 80% identical to the homologous region of comparable size, more preferably 85% identical and even more preferably 90-95% identical. In certain embodiments, it is advantageous to use nucleic acids in combination with appropriate means, such as a detectable label, for detecting hybridization. A wide variety of appropriate indicators are known in the art including, fluorescent, radioactive, enzymatic, or other ligands (e.g., avidin/biotin).

[0201] Probes typically comprise single-stranded nucleic acids of between 10 to 1000 nucleotides in length, for instance of between 10 and 800, more preferably of between 15 and 700, typically of between 20 and 500. Primers typically are shorter single-stranded nucleic acids, of between 10 to 25 nucleotides in length, designed to perfectly or almost perfectly match a nucleic acid of interest, to be amplified. The probes and primers are “specific” to the nucleic acids they hybridize to, i.e. they preferably hybridize under high stringency hybridization conditions (corresponding to the highest melting temperature Tₘ, e.g., 50% formamide, 5× or 6×SCC. SCC is a 0.15 M NaCl, 0.015 M Na-citrate). The nucleic acid primers or probes used in the above amplification and detection method may be assembled as a kit. Such a kit includes consensus primers and molecular probes. A preferred kit also includes the components necessary to determine if amplification has occurred. The kit may also include, for example, PCR buffers and enzymes; positive control sequences, reaction control primers; and instructions for amplifying and detecting the specific sequences.

[0202] In a particular embodiment, the methods of the invention comprise the steps of providing total RNAs extracted from cumulus cells and subjecting the RNAs to amplification and hybridization to specific probes, more particularly by means of a quantitative or semi quantitative RT-PCR.

[0203] In another preferred embodiment, the expression level is determined by DNA chip analysis. Such DNA chip or nucleic acid microarray consists of different nucleic acid probes that are chemically attached to a substrate, which can be a microchip, a glass slide or a micro sphere-sized bead. A microchip may be constituted of polymers, plastics, resins, polysaccharides, silica or silica-based materials, carbon, metals, inorganic glasses, or nitrocellulose. Probes comprise nucleic acids such as cDNAs or oligonucleotides that may be about 10 to about 60 base pairs. To determine the expression level, a sample from a test subject, optionally first subjected to a reverse transcription, is labeled and contacted with the microarray in hybridization conditions, leading to the formation of complexes between target nucleic acids that are complementary to probe sequences attached to the microarray surface. The labeled hybridized complexes are then detected and can be quantified or semi-quantified. Labeling may be achieved by various methods, e.g. by using radioactive, or fluorescent labeling. Many variants of the microarray hybridization technology are available to the man skilled in the art. See, e.g., the review by Hoheisel in Nature Reviews, Genetics (2006) 7: 200-210.

[0204] The following examples are put forth so as to provide those of ordinary skill in the art with a complete disclosure and description of how to make and use the subject invention, and are not intended to limit the scope of what is regarded as the invention. Efforts have been made to ensure accuracy with respect to the numbers used (e.g. amounts, temperature, concentrations) but some experimental errors and deviations should be allowed for. Unless otherwise indicated, parts are parts by weight, molecular weight is average molecular weight, temperature is in degrees centigrade; and pressure is at or near atmospheric.

### EXAMPLES

[0205] The invention is further described in detail by reference to the following experimental examples. These examples are provided for purposes of illustration only, and are not intended to be limiting unless otherwise specified. Thus, the invention should in no way be construed as being limited to the following examples, but rather, should be construed to encompass any and all variations which become evident as a result of the teaching provided herein.

### Example 1

### Identification of Markers Differently Expressed in Oocytes

[0206] The processing of oocytes was conducted in a dedicated DNA-free clean-room environment. A total of 27 oocytes, including seven single oocytes (three chromosomally normal and four chromosomally abnormal) and four pooled samples each consisting of five pooled oocytes of unknown chromosomal status were analyzed.

[0207] Oocytes were collected in sterile, RNase-free conditions and processed rapidly in order to minimize changes in marker expression. The zona pellucida was removed to ensure the exclusion of all cumulus cells from the sample and the polar body was separated from the oocyte. The oocyte was transferred to a microcentrifuge tube and then immediately frozen, while the polar body was thoroughly washed to remove any DNA contaminants before transfer to a separate microcentrifuge tube.

[0208] The polar body DNA was released by lysing the cell. Polar bodies were washed in four 10 μl droplets of phosphate-buffered saline-0.1% polyvinyl alcohol, transferred to a microfuge tube containing 2 μL of proteinase k (125 μg/mL) and 1 μL of sodium dodecyl sulfate (17 μM), and overlaid with oil. Incubation at 37° C. for 1 hour, followed by 15 minutes at 95° C., was done to release the DNA. See Wells, et al. (2002) Fertility and Sterility 78: 543.

[0209] The polar body DNA was then amplified using a whole genome amplification method called degenerate oligonucleotide primed PCR (DOP-PCR). Polar-body DNA was amplified using a modification of previously reported methods. Wells, et al. (1999) Nuc Acids Res 27: 1214-1218. Amplification took place in a 50 μL, reaction volume containing the following: 0.2 mM dNTPs; 2.0 μM degenerate oligonucleotide primer, CCGACTCGAGNNNNNNATGTGG; 1× SuperTaq Plus buffer, and 2.5 U of SuperTaq Plus polymerase (Ambion, Austin, Tex.). Thermal cycling conditions were as follows: 94° C. for 4.5 minutes; 8 cycles of 95° C. for 30 seconds, 30° C. for 1 minute, a 1° C./s ramp to 72° C., and 72° C. for 3 minutes; 35 cycles of 95° C. for 30 seconds, 56° C. for 1 minute, and 72° C. for 1.5 minutes; and finally, 72° C. for 8 minutes. After amplification was complete, a 5-μL aliquot of amplified DNA was transferred to a new PCR tube and retained for single-gene testing.

[0210] The amplified DNA was used for the purposes of comparative genomic hybridization (CGH), a method that reveals the copy number of every chromosome in the sample. The chromosomes within the polar body are a mirror image of those in the oocyte (e.g., if the polar body has one copy of chromosome 21 too few, the oocyte will have one copy of chromosome 21 too many). Thus, analysis of the polar body indicates whether or not the oocyte is abnormal. Amplified DNA samples (whole-genome amplification products) were precipitated and fluorescently labeled by nick translation. Polar-body DNA was labeled with Spectrum Green-dUTP (Vysis, Downers Grove, Ill.), whereas 46, XX (normal female) DNA was labeled with Spectrum Red-dUTP (Vysis). Both labeled DNAs were precipitated with 30 μg of Cot1 DNA. Precipitated DNA was resuspended in a hybridization mixture composed of 50% formamide; 2× saline sodium citrate [SSC; 20×SSC is 150 mM NaCl and 15 mM sodium citrate, pH 7]; and 10% dextran sulfate). Labeled DNA samples dissolved in hybridization mixture were denatured at 75° C. for 10 minutes, then allowed to cool at room temperature for 2 minutes, before being applied to denatured normal chromosome spreads as described below.

[0211] Metaphase spreads from a normal male (46, XY; Vysis) were dehydrated through an alcohol series (70%, 85%, and 100% ethanol for 3 minutes each) and air dried. The slides were then denatured in 70% formamide, 2×SSC at 75° C. for 5 minutes. After this incubation, the slides were put through an alcohol series at −20° C. and then dried. The labeled DNA probe was added to the slides, and a coverslip was placed over the hybridization area and sealed with rubber cement. Slides were then incubated in a humidified chamber at 37° C. for 25-30 hours. After hybridization, the slides were washed sequentially in 2×SSC (73° C.), 4×SSC (37° C.), 4×SSC+0.1% Triton-X (37° C.), 4×SSC (37° C.), and 2×SSC (room temperature); each wash lasted 5 minutes. The slides were then dipped in distilled water, passed through another alcohol series, dried, and finally mounted in anti-fade medium (DAPI II, Vysis) containing diamidophenylindole to counterstain the chromosomes and nuclei.

[0212] Fluorescent microscopic analysis allowed the amount of hybridized polar body (green) DNA to be compared with the amount of normal female (red) DNA along the length of each chromosome. Computer software (Applied Imaging, Santa Clara, Calif.) converted these data into a simple red-green ratio for each chromosome; deviations from a 1:1 ratio were indicative of loss or gain of chromosomal material. On the basis of this analysis, oocytes where identified as chromosomally normal or chromosomally abnormal.

[0213] RNA was extracted from those oocytes identified as chromosomally normal and from those identified as chromosomally abnormal. This was accomplished using an Absolutely RNA Nanoprep kit (Stratagene) according to the manufacturer's instructions. The RNA from normal and abnormal cells was amplified using a two round in vitro transcription procedure. For this purpose the extracted RNA was subjected to reverse transcription (RT), primed using an oligo(dT) primer containing a phage T7 RNA Polymerase promoter sequence at its 5′-end. First strand cDNA synthesis was catalyzed by SuperScript® III Reverse Transcriptase (Invitrogen) and performed at an elevated temperature to reduce RNA secondary structure. The RNA of the cDNA:RNA hybrid produced during RT was digested into small RNA fragments using an RNase H enzyme. The RNA fragments primed second strand cDNA synthesis. The resulting double-stranded cDNA contained a T7 transcription promoter in an orientation that will generate anti-sense RNA (aRNA; also called nRNA) during a subsequent in vitro transcription reaction. High yields of aRNA were produced in a rapid in vitro transcription reaction that utilized a T7 RNA polymerase and the double-stranded cDNA produced in the previous step. The aRNA produced was then purified by spin column chromatography. This initial round of reverse transcription and in vitro RNA synthesis was undertaken using a TargetAmp kit (Epicentre Biotechnologies). A second round of reverse transcription, second strand cDNA synthesis and in vitro transcription was accomplished using a NanoAmp RT-IVT labeling kit (Applied Biosystems), following the manufacturer's recommended protocol. During the second round of amplification labeled nucleotides were incorporated into the RNA, permitting subsequent chemiluminescent detection after hybridization to a microarray. The amplification process produced up to 21 μg of RNA per oocyte. The fragments produced were up to 10 kb in size (mean fragment size—500 bp).

[0214] An Applied Biosystems Human Genome Survey Microrray was used to analyze RNA expression. This microarray has 32,878 probes for the interrogation of 29,098 genes. The chemiluminescent detection system of this microarray provides a great dynamic range that allows for the detection of rare transcripts and reliable identification of subtle variations in expression level. This microarray, and information about this particular microarray, is available from Applied Biosystems. Expression analysis was performed using Panther software (Applied Biosystems, CA) and Spotfire.

[0215] Human oocytes were found to express over 12,400 markers. Of these, 6,226 markers appeared to be expressed consistently and have been detected in all samples assessed. A comparison of chromosomally normal oocytes with chromosomally abnormal oocytes revealed a total of 308 markers displaying a significant difference in expression level (46 markers p<0.01; 262 markers p<0.05). Of the markers displaying statistically significant differences in expression between chromosomally normal oocytes and chromosomally abnormal oocytes, those showing the greatest fold differences in expression are listed in TABLE 2.

TABLE 2
depicts a list of markers differentially expressed between chromosomally normal and chromosomally abnormal oocytes.

| Exemplified | | | | | | |
|---|---|---|---|---|---|---|
| by SEQ | Entrez | Ensembl | Gene | | abnormal/ | |
| ID NOs | GeneID | GeneID | Symbol | Gene Name | normal | p-value |
| 1, 93 | 2533 | ENSG00000082074 | FYB | FYN binding protein (FYB-120/130) | 0.1962 | 0.00046 |
| 2, 94 | 440073 | ENSG00000120645 | IQSEC3 | IQ motif and Sec7 domain 3 | 1.6546 | 0.00063 |
| 3, 95 | 29097 | ENSG00000143771 | CNIH4 | cornichon homolog 4 | 0.1966 | 0.00088 |
| 4, 96 | 340419 | ENSG00000147655 | RSPO2 | R-spondin 2 homolog | 1.7716 | 0.00099 |
| 5, 97 | 9851 | ENSG00000198920 | KIAA0753 | KIAA0753 | 0.0784 | 0.00114 |
| 6, 98 | 222484 | ENSG00000139517 | LNX2 | Ligand of numb-protein X 2 | 0.3123 | 0.00161 |
| 7 | 284475 | — | LOC284475 | hypothetical protein | 0.4473 | 0.00243 |
| 8, 99 | 126789 | ENSG00000169972 | PUSL1 | pseudouridylate synthase-like 1 | 1.7901 | 0.00274 |
| 9, 100 | 113179 | ENSG00000213638 | ADAT3 | adenosine deaminase, tRNA-specific 3 | 0.2204 | 0.00279 |
| 10, 101 | 3621 | ENSG00000153487 | ING1 | inhibitor of growth family, member 1 | 12.2589 | 0.00388 |
| 11, 102 | 55611 | ENSG00000167770 | OTUB1 | OTU domain, ubiquitin aldehyde binding 1 | 0.4151 | 0.00391 |
| 12, 103 | 5081 | ENSG00000009709 | PAX7 | paired box gene 7 | 2.7515 | 0.00447 |
| 13, 104 | 5919 | ENSG00000106538 | RARRES2 | retinoic acid receptor responder (tazarotene | 2.5706 | 0.00476 |
| 14, 105 | 25963 | ENSG00000103978 | TMEM87A | transmembrane protein 87A | 2.8555 | 0.00494 |
| 15, 106 | 501 | ENSG00000164904; | ALDH7A1 | aldehyde dehydrogenase 7 family, member Al | 0.4209 | 0.00522 |
| 16, 107 | 8394 | ENSG00000143398 | PIP5K1A | phosphatidylinositol-4-phosphate 5-kinase, | 0.4273 | 0.03590 |
| 17, 108 | 9254 | ENSG00000007402 | CACNA2D2 | calcium channel, voltage-dependent, alpha | 4.4399 | 0.00533 |
| 18, 109 | 54033 | ENSG00000185272 | RBM11 | RNA binding motif protein 11 | 0.3571 | 0.00534 |
| 19, 110 | 84643 | ENSG00000141200 | KIF2B | kinesin family member 2B | 3.6393 | 0.00570 |
| 20, 111 | 84074 | ENSG00000129646 | QRICH2 | glutamine rich 2 | 2.6744 | 0.00579 |
| 21, 112 | 4759 | ENSG00000115488 | NEU2 | sialidase 2 (cytosolic sialidase) NEU2 | 2.6492 | 0.00637 |
| 22, 113 | 25923 | ENSG00000184743 | ALTA3 | DKFZP564j0863 protein | 0.0703 | 0.00678 |
| 23, 114 | 83657 | ENSG00000168589 | DYNLRB2 | dynein, cytoplasmic, light polypeptide 2B | 2.6787 | 0.00791 |
| 24, 115 | 144501 | ENSG00000167767 | KRT80 | keratin 80 | 0.7072 | 0.00815 |
| 25, 116 | 5162 | ENSG00000168291 | PDHB | pyruvate dehydrogenase (lipoamide) beta | 0.2264 | 0.00910 |
| 26, 117 | 10533 | ENSG00000197548 | ATG7 | ATG7 autophagy related 7 homolog | 0.5964 | 0.00935 |
| 27, 118 | 5558 | ENSG00000146143 | PRIM2 | primase, polypeptide 2A, 58 kDa | 2.4069 | 0.00970 |
| 28, 119 | 10097 | ENSG00000138071 | ACTR2 | ARP2 actin-related protein 2 homolog | 3.4179 | 0.01011 |
| 29, 120 | 91433 | ENSG00000166965 | RCCD1 | RCC1 domain containing 1 | | |
| 30, 121 | 339287 | ENSG00000188895 | MSL-1 | male-specific lethal-1 homolog | 0.2941 | 0.01145 |
| 31, 122 | 51514 | ENSG00000143476 | DTL | denticleless homolog | 5.3455 | 0.01253 |
| 32, 123 | 91768 | ENSG00000134508 | CABLES1 | Cdk5 and Abl enzyme substrate 1 | 1.8754 | 0.01308 |
| 33, 124 | 345611 | — | IRGM | immunity-related GTPase family, M | 3.1934 | 0.01334 |
| 34, 125 | 23788 | ENSG00000109919 | MTCH2 | mitochondrial carrier homolog 2 | 0.3084 | 0.01354 |
| 35, 126 | 5125 | ENSG00000099139 | PCSK5 | proprotein convertase subtilisin/kexin type 5 | 5.0740 | 0.01542 |
| 36, 127 | 64064 | ENSG00000198754 | OXCT2 | 3-oxoacid CoA transferase 2 | 0.5209 | 0.01546 |
| 37, 128 | 1843 | ENSG00000120129 | DUSP1 | dual specificity phosphatase 1 | 0.0849 | 0.01594 |
| 38, 129 | 10970 | ENSG00000136026 | CKAP4 | cytoskeleton-associated protein 4 | 0.2647 | 0.01598 |
| 39, 130 | 128240 | ENSG00000163382 | AP0A1BP | apolipoprotein A-I binding protein | 3.6208 | 0.01609 |
| 40, 131 | 84109 | ENSG00000186867 | GPR103 | G protein-coupled receptor 103 | 0.3496 | 0.01685 |
| 41, 132 | 90338 | ENSG00000170949 | ZNF160 | zinc finger protein 160 | 0.2457 | 0.01733 |
| 42, 133 | 9708 | ENSG00000214574 | PCDHGA8 | protocadherin gamma subfamily A, 8 | 1.8571 | 0.01774 |
| 43, 134 | 5201 | ENSG00000113068 | PFDN1 | prefoldin 1 | 4.5350 | 0.01812 |
| 44, 135 | 23761 | ENSG0000,0100141 | PISD | phosphatidylserine decarboxylase | 0.5412 | 0.01912 |
| 45, 136 | 7277 | ENSG00000127824 | TUB4A | tubulin, alpha 1 (testis specific) | 1.5449 | 0.01937 |
| 46, 137 | 23705 | ENSG00000182985 | CADMI | immunoglobulin superfamily, member 4 | 2.3015 | 0.01955 |
| 47, 138 | 9373 | ENSG00000137055 | PLAA | phospholipase A2-activating protein | 0.4540 | 0.02028 |
| 48, 139 | 27242 | ENSG00000146072 | TNFRSF21 | tumor necrosis factor receptor superfamily, | 0.4338 | 0.02048 |
| 49 | 439991 | — | LOC439991 | similar to D-PCa-2 protein | 1.3575 | 0.02243 |
| 50, 140 | 219988 | ENSG00000166889 | PATL1 | topoisomerase II-associated protein | 0.3673 | 0.02299 |
| 51, 141 | 5797 | ENSG00000173482 | PTPRM | protein tyrosine phosphatase, receptor type, M | 0.2815 | 0.02410 |
| 52, 142 | 10497 | ENSG00000198722 | UNC13B | unc-13 homolog B | 0.3288 | 0.02429 |
| 53, 143 | 10461 | ENSG00000153208 | MERTK | c-mer proto-oncogene tyrosine kinase | 0.3436 | 0.02470 |
| 54, 144 | 1997 | ENSG00000120690 | ELF1 | E74-like factor 1 (ets domain transcription | 0.2396 | 0.02496 |
| 55, 145 | 56604 | ENSG00000127589 | TUBB4Q | tubulin, beta polypeptide 4, member Q | 1.8208 | 0.02637 |
| 56, 146 | 5223 | ENSG00000171314 | PGAM1 | phosphoglycerate mutase 1 (brain) | 0.1760 | 0.03014 |
| 57, 147 | 5395 | ENSG00000122512 | PMS2 | postmeiotic segregation increased 2 | | |
| 58, 148 | 56203 | ENSG00000163380 | LMOD3 | leiomodin 3 (fetal) | 0.3314 | 0.03082 |
| 59, 149 | 2101 | ENSG00000173153 | ESRRA | estrogen-related receptor alpha | 4.7284 | 0.03175 |
| 60, 150 | 373861 | ENSG00000188662 | HILS1 | histone linker H1 domain, spennatid-specific 1 | 0.3991 | 0.03194 |
| 61, 151 | 4212 | ENSG00000134138 | MEIS2 | Meis homeobox 2 | 0.3137 | 0.03345 |
| 62, 152 | 5636 | ENSG00000141127 | PRPSAP2 | phosphoribosyl pyrophosphate synthetase- | 0.1847 | 0.03423 |
| 63, 153 | 114827 | ENSG00000142621 | FHAD1 | forkhead-associated (FHA) phosphopeptide | 4.4247 | 0.03436 |
| 64, 154 | 92181 | ENSG00000168246 | UBTD2 | ubiquitin domain containing 2 | 0.2467 | 0.03498 |
| 65, 155 | 7067 | ENSG00000126351 | THRA | thyroid hormone receptor, alpha | 0.1797 | 0.03562 |
| 66, 156 | 139741 | ENSG00000123165 | ACTRT1 | actin-related protein T1 | 0.3739 | 0.03563 |
| 67, 157 | 55544 | ENSG00000132819 | RBM38 | RNA binding motif protein 38 | 4.1900 | 0.03581 |
| 68, 158 | 6388 | ENSG00000132581 | SDF2 | stromal cell-derived factor 2 | 0.2185 | 0.03615 |
| 69, 159 | 168975 | ENSG00000176571 | CNBD1 | cyclic nucleotide binding domain containing 1 | 0.1701 | 0.03643 |
| 70, 160 | 56257 | ENSG00000146834 | MEPCE | bin3, bicoid-interacting 3, homolog | 3.3279 | 0.03645 |
| 71, 161 | 55831 | ENSG00000125037 | TMEM111 | transmembrane protein 111 | 5.2241 | 0.03702 |
| 72, 162 | 5782 | ENSG00000127947 | PTPN12 | protein tyrosine phosphatase, non-receptor | 0.2185 | 0.03824 |
| 73, 163 | 7336 | ENSG00000169139 | UBE2V2 | ubiquitin-conjugating enzyme E2 variant 2 | 0.2215 | 0.04004 |
| 74, 164 | 22849 | ENSG00000107864 | CPEB3 | cytoplasmic polyadenylation element binding | 2.5130 | 0.04203 |
| 75, 165 | 8366 | ENSG00000124529 | HIST1H4B | histone 1, H4b | 2.4576 | 0.04207 |
| 76, 166 | 254531 | ENSG00000176454 | AGPAT7 | 1-acylglycerol-3-phosphate 0-acyltransferase | 3.3807 | 0.04318 |
| 77, 167 | 81704 | ENSG00000107099 | DOCK8 | dedicator of cytokinesis 8 | 0.2787 | 0.04387 |
| 78, 168 | 143689 | ENSG00000134627 | PIWIL4 | piwi-like 4 | 0.2890 | 0.04439 |
| 79, 169 | 10336 | ENSG00000185619 | PCGF3 | polycomb group ring finger 3 | 4.8836 | 0.04479 |
| 80, 170 | 3158 | ENSG00000134240 | HMGCS2 | 3-hydroxy-3-methylglutaryl-Coenzyme A | 0.4403 | 0.04533 |
| 81, 171 | 259266 | ENSG00000066279 | ASPM | asp (abnormal spindle)-like, microcephaly | 0.2942 | 0.04578 |
| 82, 172 | 9948 | ENSG00000071127 | WDR1 | WD repeat domain 1 | 2.2581 | 0.04632 |
| 83, 173 | 83985 | ENSG00000169682 | SPNSI | Spinster | 0.4638 | 0.04716 |
| 84, 174 | 51741 | ENSG00000186153 | WWOX | WW domain containing oxidoreductase | 4.9246 | 0.04778 |
| 85, 175 | 1576 | ENSG00000160868 | CYP3A4 | cytochrome P450, family 3, subfamily A, | 3.1504 | 0.04855 |
| 86, 176 | 9238 | ENSG00000136270 | TBRG4 | transforming growth factor beta regulator 4 | 0.3539 | 0.04901 |
| 87, 177 | 84666 | ENSG00000163515 | RETNLB | resistin like beta | 0.1210 | 0.00918 |
| 88, 178 | 10487 | ENSG00000131236 | CAP1 | CAP, adenylate cyclase-associated protein 1 | 2.1734 | 0.01121 |
| 89, 179 | 23175 | ENSG00000134324 | LPIN1 | lipin 1 | 0.4955 | 0.03730 |
| 90, 180 | 4850 | ENSG00000080802 | CNOT4 | CCR4-NOT transcription complex, subunit 4 | 9.1233 | 0.04524 |
| 91, 181 | 120329 | — | CASP12 | caspase 12 | 0.2563 | 0.03776 |
| 92, 182 | 6611 | ENSG00000102172 | SMS | spermine synthase | 0.1262 | 0.02887 |
| | — | — | — | Probe 131701 hybridizing Celera | | |
| | | | | hCG2040689 | | |
| | — | | — | Probe 228780 hybridizing Celera | | |
| | | | | hCG1987894 | | |
| | — | — | — | Probe 705174 hybridizing Celera | | |
| | | | | hCG2043502 | | |
| | — | — | — | Probe 233419 hybridizing Celera | | |
| | | | | hCG1644979 | | |

GeneID is a unique identifier assigned to a record in Entrez Gene. Entrez Gene provides these tracked, unique identifiers for genes and reports information associated with those identifiers for unrestricted public use at the National Center for Biotechnology Information Website. Ensembl GeneID is a unique stable gene identifier of the Ensembl database, publicly available at the Ensembl Genome Browser. See Hubbard, et al. (2007) Nucleic Acids Res. 35 (Database Issue): D610-7.

[0216] Several of the differentially expressed markers are known or suspected to be involved in the maintenance of accurate chromosome segregation, including checkpoint genes and microtubule motor proteins and may have fundamental roles in the genesis of aneuploidy in human oocytes. For example, abnormal expressed of TUBA1 was observed in aneuploid oocytes. Mutations in this gene destabilize spindle microtubules, potentially leading to chromosome malsegregation. Abnormal expression of dynein and kinesin genes (e.g. DNCL2B and KIF2B genes) was also observed and may be significant given the role of the protein products of such genes in facilitating chromosomal movement.

[0217] Although some of the pathways implicated have been suggested to be involved in the genesis of meiotic chromosome error, surprisingly, none of the specific differentially expressed markers identified have been the subject of investigation for meiotic chromosome error. For example, it has been speculated that mitochondrial dysfunction could lead to problems with chromosome segregation, possibly due to ATP depletion. However, the mitochondrial (or mitochondrion-related) genes highlighted in this study (e.g., MTCH2, HMGCS2) have not previously been suggested to have a role in aneuploidy.

[0218] The markers having traditionally attracted the most attention as potential candidates for regulating meiotic chromosome malsegregation, appear by this analysis to be of lesser importance. For example, well-characterized genes functioning in the metaphase-anaphase (spindle) checkpoint (e.g., BUB1 and MAD2) were not found to show altered expression in aneuploid oocytes, while lesser studied genes with potential roles in cell cycle control displayed significant differences in gene expression, such as ASP (abnormal spindle-like, microcephaly associated.) and UBE2V2.

[0219] Several markers involved in nucleoside metabolism and cholesterol biosynthesis were differentially expressed between chromosomally normal and chromosomally abnormal oocytes, including PRPSAP2 and CYP3A4. This suggests that these processes might be directly or indirectly involved with chromosome malsegregation during female meiosis.

[0220] Several markers are located on the cell surface, or are excreted proteins, or are involved in biosynthetic pathways that affect levels of excreted metabolites were differentially expressed between chromosomally normal and chromosomally abnormal oocytes. For example, genes for cell surface receptor proteins, TNFRSF21, PTPRM, ESRRA, GPR103 and THRA.

### Example 2

### Identification of Markers Differently Expressed in Cumulus Cells

[0221] The processing of cumulus cells was conducted in a dedicated DNA-free clean-room environment. A total of six cumulus cells (three chromosomally normal and three chromosomally abnormal) were analyzed.

[0222] Cumulus cells were collected in sterile, RNase-free conditions. The cumulus cells were separated from the oocyte mechanically and processed rapidly in order to minimize changes in marker expression. The zona pellucida was removed from the corresponding oocyte and the polar body was separated. The oocyte was transferred to a microcentrifuge tube and then immediately frozen, while the polar body was thoroughly washed to remove any DNA contaminants before transfer to a separate microcentrifuge tube.

[0223] The polar body DNA was released by lysing the cell. Polar bodies were washed in four 10 μL droplets of phosphate-buffered saline-0.1% polyvinyl alcohol, transferred to a microfuge tube containing 2 μL of proteinase k (125 μg/mL) and 1 μL of sodium dodecyl sulfate (17 μM), and overlaid with oil. Incubation at 37° C. for 1 hour, followed by 15 minutes at 95° C., was done to release the DNA. See Wells, et al. (2002) Fertility and Sterility 78: 543.

[0224] The polar body DNA was then amplified using a whole genome amplification method called degenerate oligonucleotide primed PCR (DOP-PCR). Polar-body DNA was amplified using a modification of previously reported methods. Wells, et al. (1999) Nuc Acids Res 27: 1214-1218. Amplification took place in a 50-μL reaction volume containing the following: 0.2 mM dNTPs; 2.0 μM degenerate oligonucleotide primer, CCGACTCGAGNNNNNNATGTGG; 1× SuperTaq Plus buffer, and 2.5 U of SuperTaq Plus polymerase (Ambion, Austin, Tex.). Thermal cycling conditions were as follows: 94° C. for 4.5 minutes; 8 cycles of 95° C. for 30 seconds, 30° C. for 1 minute, a 1° C./s ramp to 72° C., and 72° C. for 3 minutes; 35 cycles of 95° C. for 30 seconds, 56° C. for 1 minute, and 72° C. for 1.5 minutes; and finally, 72° C. for 8 minutes. After amplification was complete, a 5-μL aliquot of amplified DNA was transferred to a new PCR tube and retained for single-gene testing.

[0225] The amplified DNA was used for the purposes of comparative genomic hybridization (CGH), a method that reveals the copy number of every chromosome in the sample. The chromosomes within the polar body are a mirror image of those in the oocyte (e.g. if the polar body has one copy of chromosome 21 too few, the oocyte will have one copy of chromosome 21 too many). Thus, analysis of the polar body indicates whether or not the oocyte is abnormal. Amplified DNA samples (whole-genome amplification products) were precipitated and fluorescently labeled by nick translation. Polar-body DNA was labeled with Spectrum Green-dUTP (Vysis, Downers Grove, Ill.), whereas 46, XX (normal female) DNA was labeled with Spectrum Red-dUTP (Vysis). Both labeled DNAs were precipitated with 30 μg of Cot1 DNA. Precipitated DNA was resuspended in a hybridization mixture composed of 50% formamide; 2× saline sodium citrate [SSC; 20×SSC is 150 mM NaCl and 15 mM sodium citrate, pH 7]; and 10% dextran sulfate). Labeled DNA samples dissolved in hybridization mixture were denatured at 75° C. for 10 minutes, then allowed to cool at room temperature for 2 minutes, before being applied to denatured normal chromosome spreads as described below.

[0226] Metaphase spreads from a normal male (46, XY; Vysis) were dehydrated through an alcohol series (70%, 85%, and 100% ethanol for 3 minutes each) and air dried. The slides were then denatured in 70% formamide, 2×SSC at 75° C. for 5 minutes. After this incubation, the slides were put through an alcohol series at −20° C. and then dried. The labeled DNA probe was added to the slides, and a coverslip was placed over the hybridization area and sealed with rubber cement. Slides were then incubated in a humidified chamber at 37° C. for 25-30 hours. After hybridization, the slides were washed sequentially in 2×SSC (73° C.), 4×SSC (37° C.), 4×SSC+0.1% Triton-X (37° C.), 4×SSC (37° C.), and 2×SSC (room temperature); each wash lasted 5 minutes. The slides were then dipped in distilled water, passed through another alcohol series, dried, and finally mounted in anti-fade medium (DAPI II, Vysis) containing diamidophenylindole to counterstain the chromosomes and nuclei.

[0227] Fluorescent microscopic analysis allowed the amount of hybridized polar body (green) DNA to be compared with the amount of normal female (red) DNA along the length of each chromosome. Computer software (Applied Imaging, Santa Clara, Calif.) converted these data into a simple red-green ratio for each chromosome; deviations from a 1:1 ratio were indicative of loss or gain of chromosomal material. On the basis of this analysis, oocytes and their associated cumulus cells were identified as chromosomally normal or chromosomally abnormal.

[0228] RNA was extracted from those cumulus cells associated with chromosomally normal oocytes and from those associated with oocytes that were chromosomally abnormal. This was accomplished using an Absolutely RNA Nanoprep kit (Stratagene) according to the manufacturer's instructions. The RNA was amplified using a two round in vitro transcription procedure. For this purpose the extracted RNA was subjected to reverse transcription (RT), primed using an oligo(dT) primer containing a phage T7 RNA Polymerase promoter sequence at its 5′-end. First strand cDNA synthesis was catalyzed by SuperScript® III Reverse Transcriptase (Invitrogen) and performed at an elevated temperature to reduce RNA secondary structure. The RNA of the cDNA:RNA hybrid produced during RT was digested into small RNA fragments using an RNase H enzyme. The RNA fragments primed second strand cDNA synthesis. The resulting double-stranded cDNA contained a T7 transcription promoter in an orientation that will generate anti-sense RNA (aRNA; also called tRNA) during a subsequent in vitro transcription reaction. High yields of aRNA were produced in a rapid in vitro transcription reaction that utilized a T7 RNA polymerase and the double-stranded cDNA produced in the previous step. The aRNA produced was then purified by spin column chromatography. This initial round of reverse transcription and in vitro RNA synthesis was undertaken using a TargetAmp kit (Epicentre Biotechnologies).

[0229] A second round of reverse transcription, second strand cDNA synthesis and in vitro transcription was accomplished using a NanoAmp RT-IVT labeling kit (Applied Biosystems), following the manufacturer's recommended protocol. During the second round of amplification labeled nucleotides were incorporated into the RNA, permitting subsequent chemiluminescent detection after hybridization to a microarray. The amplification process produced up to 154 μg of RNA per cumulus cell. The fragments produced were up to 10 kb in size (mean fragment size −500 bp).

[0230] An Applied Biosystems Human Genome Survey Microrray was used to analyze RNA expression. This microarray has 32,878 probes for the interrogation of 29,098 genes. The chemiluminescent detection system of this microarray provides a great dynamic range that allows for the detection of rare transcripts and reliable identification of subtle variations in expression level. This microarray, and information about this particular microarray, is available from Applied Biosystems. Expression analysis was performed using Panther software (Applied Biosystems, CA) and Spotfire.

[0231] Human cumulus cells were found to express over 8,000 markers. Of these, 3,350 markers appeared to be expressed consistently and have been detected in all samples assessed. A comparison of chromosomally normal cumulus cells with chromosomally abnormal cumulus cells revealed 752 markers displaying a significant difference in expression level (125 markers p<0.01; 627 markers p<0.05).

[0232] Of the markers displaying statistically significant differences in expression between chromosomally normal cumulus cells and chromosomally abnormal cumulus cells, those with the greatest fold differences in expression are listed in TABLE 3.

TABLE 3
depicts a list of markers differentially expressed between cumulus cells associated with chromosomally normal
oocytes and cumulus cells associated with chromosomally abnormal oocytes.

| Exemplified | | | | | | |
|---|---|---|---|---|---|---|
| by SEQ ID | Entrez | Ensembl | Gene | | abnormal/ | |
| NOS: | GeneID | GeneID | Symbol | Gene Name | normal | p-value |
| 183, 283 | 4070 | ENSG00000184292 | TACSTD2 | tumor-associated calcium signal transducer 2 | 0.0575 | 0.00390 |
| 184, 284 | 5930 | ENSG00000122257 | RBBP6 | retinoblastoma binding protein 6 | 0.1509 | 0.00104 |
| 185, 285 | 148789 | ENSG00000162885 | B3GALNT2 | beta-1,3-N-acetylgalactosaminyltransferase 2 | 0.1520 | 0.00256 |
| 186, 286 | 79680 | ENSG00000215012 | FLJ21125 | chromosome 22 open reading frame 29 | 0.1526 | 0.00269 |
| 187, 287 | 6360 | ENSG00000161573 | CCL16 | chemokine (C—C motif) ligand 16 | 0.1580 | 0.00031 |
| 188, 288 | 1660 | ENSG00000135829 | DHX9 | DEAH (Asp-Glu-Ala-His) box polypeptide 9 | 0.1818 | 0.00714 |
| 189, 289 | 79075 | ENSG00000136982 | DCC1 | defective in sister chromatid cohesion homolog | 0.2015 | 0.00150 |
| 190, 290 | 55186 | ENSG00000114120 | SLC25A36 | solute carrier family 25, member 36 | 0.2200 | 0.00970 |
| 191, 291 | 285761 | ENSG00000164465 | DCBLD1 | discoidin, CUB and LCCL domain containing | 0.2311 | 0.00195 |
| 192, 292 | 55752 | ENSG00000138758 | SEPT11 | septin 11 | 0.2345 | 0.00892 |
| 193, 293 | 55593 | ENSG00000068308 | OTUD5 | OTU domain containing 5 | 0.2430 | 0.00730 |
| 194, 294 | 284047 | ENSG00000154874 | CCDC144B | coiled-coil domain containing 144B | 0.1529 | 0.01005 |
| 195, 295 | 3592 | ENSG00000168811 | IL12A | interleukin 12A | 0.0575 | 0.00390 |
| 196, 296 | 56675 | ENSG00000175352 | NRIP3 | nuclear receptor interacting protein 3 | 0.2843 | 0.00012 |
| 197, 297 | 136319 | ENSG00000105887 | MTPN | myotrophin | 0.3123 | 0.00508 |
| 198, 298 | 1464 | ENSG00000173546 | CSPG4 | chondroitin sulfate proteoglycan 4 | 0.3199 | 0.00274 |
| 199, 299 | 80149 | ENSG00000163874 | ZC3H12A | zinc finger CCCH-type containing 12A | 0.3347 | 0.00019 |
| 200, 300 | 56143 | ENSG00000204965 | PCDHA5 | protocadherin alpha 5 | 0.3401 | 0.00673 |
| 201, 301 | 8703 | ENSG00000158850 | B4GALT3 | UDP-Gal:betaGlcNAc beta 1,4- | 0.3414 | 0.00595 |
| 202, 302 | 116225 | ENSG00000165724 | ZMYND19 | zinc forger, MYND-type containing 19 | 0.3479 | 0.00889 |
| 203, 303 | 143425 | ENSG00000170743 | SYT9 | synaptotagmin IX | 0.3569 | 0.00040 |
| 204, 304 | 7027 | ENSG00000198176 | TFDP1 | transcription factor Dp-1 | 0.3621 | 0.00752 |
| 205, 305 | 55132 | ENSG00000138709 | LARP2 | La ribonucleoprotein domain family, member | 0.3740 | 0.00070 |
| 206, 306 | 8837 | ENSG00000003402 | CFLAR | CASP8 and FADD-like apoptosis regulator | 0.3798 | 0.00502 |
| 207, 307 | 51280 | ENSG00000135052 | GOLM1 | golgi membrane protein 1 | 0.3875 | 0.00093 |
| 208, 308 | 11202 | ENSG00000129455 | KLK8 | kallikrein-related peptidase 8 | 0.3899 | 0.00844 |
| 209, 309 | 3921 | ENSG00000168028 | RPSA15 | LOC388524 ribosomal protein SA | 0.3936 | 0.00603 |
| 210, 310 | 55182 | ENSG00000187147 | Clorf164 | chromosome 1 open reading frame 164 | 0.3983 | 0.00400 |
| 211, 311 | 23543 | ENSG00000100320 | RBM9 | RNA binding motif protein 9 | 0.4030 | 0.00599 |
| 212, 312 | 127253 | ENSG00000162623 | TYW3 | tRNA-yW synthesizing protein 3 homolog | 0.4182 | 0.00868 |
| 213, 313 | 594 | ENSG00000083123 | BCKDHB | branched chain keto acid dehydrogenase E1, | 0.4224 | 0.00851 |
| 214, 314 | 64663 | ENSG00000198573 | SPANXC | SPANX family, member C | 0.4278 | 0.00115 |
| 215 | — | ENSG00000187832 | RPSA | ribosomal protein SA | 0.4380 | 0.00662 |
| 216, 315 | 115752 | ENSG00000166938 | DIS3L | DIS3 mitotic control homolog | 0.4479 | 0.00445 |
| 217, 316 | 9894 | ENSG00000100726 | TELO2 | TEL2, telomere maintenance 2, homolog | 0.4513 | 0.00911 |
| 218, 317 | 1019 | ENSG00000135446 | CDK4 | cyclin-dependent kinase 4 | 0.4608 | 0.00131 |
| 219, 318 | 7169 | ENSG00000198467 | TPM2 | tropomyosin 2 (beta) | 0.4612 | 0.00251 |
| 220, 319 | 127406 | ENSG00000188819 | LOC127406 | similar to laminin receptor 1 | 0.4623 | 0.00963 |
| 221, 320 | 91272 | ENSG00000145919 | FAM44B | family with sequence similarity 44, member B | 0.4627 | 0.00728 |
| 222, 321 | 171392 | ENSG00000197372 | ZNF675 | zinc finger protein 675 | 0.4648 | 0.00732 |
| 223, 322 | 308 | ENSG00000164111 | ANXAS | annexin A5 | 0.4667 | 0.00530 |
| 224, 323 | 3340 | ENSG00000070614 | NDST1 | N-deacetylase/N-sulfotransferase (heparan | 0.4723 | 0.00603 |
| 225, 324 | 85459 | ENSG00000166004 | KIAA1731 | KIAA1731 | 0.4781 | 0.00723 |
| 226, 325 | 10482 | ENSG00000162231 | NXF1 | nuclear RNA export factor 1 | 0.4793 | 0.00267 |
| 227, 326 | 65987 | ENSG00000151364 | KCTD14 | potassium channel tetramerisation domain | 0.4817 | 0.00567 |
| 228, 327 | 11186 | ENSG00000068028 | RASSF1 | Ras association (Ra1GDS/AF-6) domain family | 0.4852 | 0.00142 |
| 229, 328 | 197021 | ENSG00000188501 | LCTL | lactase-like | 0.4984 | 0.00832 |
| 230, 329 | 3206 | ENSG00000153807 | HOXA1O | homeobox A10 | 3.6454 | 0.00537 |
| 231, 330 | 200261 | — | LOC200261 | LOC200261 | 0.0535 | 0.01506 |
| 232, 331 | 23126 | ENSG00000143442 | POGZ | pogo transposable element with ZNF domain | 0.0590 | 0.01359 |
| 233, 332 | 60677 | ENSG00000140488 | BRUNOL6 | bruno-like 6, RNA binding protein | 0.1172 | 0.03122 |
| 234, 333 | 6935 | ENSG00000148516 | ZEB1 | zinc finger E-box binding homeobox 1 | 0.1395 | 0.01642 |
| 235, 334 | 55075 | ENSG00000137831 | UACA | uveal autoantigen with coiled-coil domains and | 0.1587 | 0.01652 |
| 236, 335 | 9473 | ENSG00000130775 | C1orf38 | chromosome 1 open reading frame 38 | 0.1603 | 0.04512 |
| 237, 336 | 54576 | ENSG00000167165 | UGT1A9 | UDP glucuronosyltransferase 1 family, | 0.1631 | 0.02645 |
| 238, 337 | — | ENSG00000187667 | WHDC1L1 | WAS protein homology region 2 domain | 0.1695 | 0.04314 |
| 239, 338 | 440253 | — | WHDC1L2 | WAS protein homology region 2 domain | 0.1695 | 0.04314 |
| 240, 339 | 63895 | ENSG00000154864 | FAM38B | FAM38B | 0.1712 | 0.02929 |
| 241, 340 | 55088 | ENSG00000165813 | C10orf118 | ClOorf118 | 0.1808 | 0.03736 |
| 242, 341 | 983 | ENSG00000170312 | CDC2 | cyclin-dependent kinase 1 | 0.1944 | 0.01489 |
| 243, 342 | 6558 | ENSG00000064651 | SLC12A2 | solute carrier family 12 | 0.1949 | 0.02259 |
| 244, 343 | 54456 | ENSG00000073146 | MOVIOL1 | Moloney leukemia virus 10-like 1 | 0.2002 | 0.04357 |
| 245, 344 | 5332 | ENSG00000101333 | PLCB4 | phospholipase C, beta 4 | 0.2124 | 0.02353 |
| 246, 345 | 23519 | ENSG00000139223 | ANP32D | acidic (leucine-rich) nuclear phosphoprotein 32 | 0.2140 | 0.02994 |
| 247, 346 | 653121 | ENSG00000160062 | ZBTB8 | zinc finger and BTB domain containing 8 | 0.2162 | 0.03949 |
| 248, 347 | 245802 | ENSG00000166926 | MS4A6E | membrane-spanning 4-domains, subfamily A, | 0.2182 | 0.03753 |
| 249, 348 | 341392 | ENSG00000215009 | LOC341392 | acyl-CoA synthetase medium-chain family | 0.2317 | 0.02346 |
| 250, 349 | 140688 | ENSG00000197183 | C20orf112 | chromosome 20 open reading frame 112 | 0.2338 | 0.01827 |
| 251, 350 | 57730 | ENSG00000187998 | LOC375251 | KIAA1641-like | 0.2346 | 0.02143 |
| 252, 351 | 84727 | ENSG00000111671 | SPSB2 | splA/ryanodine receptor domain and SOCS | 0.2368 | 0.03253 |
| 253, 352 | 55212 | ENSG00000138686 | BBS7 | Bardet-Biedl syndrome 7 | 0.2411 | 0.02927 |
| 254, 353 | 2048 | ENSG00000133216 | EPHB2 | EPH receptor B2 | 0.2478 | 0.01074 |
| 255, 354 | 54979 | ENSG00000133328 | HRASLS2 | HRAS-like suppressor 2 | 0.2577 | 0.01007 |
| 256, 355 | 81543 | ENSG00000160233 | LRRC3 | leucine rich repeat containing 3 | 0.2606 | 0.01893 |
| 257, 356 | 9662 | ENSG00000174799 | CEP135 | centrosomal protein 135 kDa | 0.2617 | 0.04571 |
| 258, 357 | 124222 | ENSG00000162073 | PAQR4 | progestin and adipoQ receptor family member | 0.2715 | 0.03814 |
| 259, 358 | 54790 | ENSG00000168769 | KIAA1546 | KIAA1546 | 0.2721 | 0.04948 |
| 260, 359 | 7357 | ENSG00000148154 | UGCG | UDP-glucose ceramide glucosyltransferase | 0.2721 | 0.01173 |
| 261, 360 | 1553 | ENSG00000197838 | CYP2A13 | cytochrome P450, family 2, subfamily A, | 0.2725 | 0.04184 |
| 262, 361 | 10893 | ENSG00000125966 | MMP24 | matrix metallopeptidase 24 (membrane- | 0.2739 | 0.04106 |
| 263, 362 | 26267 | ENSG00000147912 | FBXO10 | F-box protein 10 | 0.2741 | 0.04768 |
| 264, 363 | 10450 | ENSG00000084072 | PPIE | peptidylprolyl isomerase E (cyclophilin E) | 0.2774 | 0.03494 |
| 265, 364 | 222166 | ENSG00000180354 | C7orf41 | chromosome 7 open reading frame 41 | 0.2815 | 0.03485 |
| 266, 365 | 29989 | ENSG00000171102 | OBP2B | odorant binding protein 2B | 0.2857 | 0.03155 |
| 267, 366 | 2318 | ENSG00000128591 | FLNC | filamin C, gamma (actin binding protein 280) | 0.2862 | 0.03826 |
| 268, 367 | 84313 | ENSG00000131475 | VPS25 | vacuolar protein sorting 25 homolog | 0.2878 | 0.03393 |
| 269, 368 | 59353 | ENSG00000126950 | TMEM35 | transmembrane protein 35 | 0.2885 | 0.02098 |
| 270, 369 | 9992 | ENSG00000159197 | KCNE2 | potassium voltage-gated channel, Isk-related | 0.2892 | 0.04245 |
| 271, 370 | 375748 | ENSG00000182150 | LOC375748 | RAD26L hypothetical protein | 0.2907 | 0.02333 |
| 272, 371 | 9486 | ENSG00000115526 | CHST10 | carbohydrate sulfotransferase 10 | 0.2948 | 0.03819 |
| 273, 372 | 51491 | ENSG00000048162 | U384 | HSPC111 | 0.2960 | 0.02762 |
| 274, 373 | 55219 | ENSG00000204178 | TMEM57 | transmembrane protein 57 | 0.2977 | 0.02216 |
| 275, 374 | 222236 | ENSG00000161048 | NAPE-PLD | N-acyl-phosphatidylethanolamine-hydrolyzing | 0.3009 | 0.01231 |
| 276, 375 | 55055 | ENSG00000174442 | ZWILCH | Zwilch, kinetochore associated, homolog | 0.3016 | 0.01698 |
| 277, 376 | 220136 | ENSG00000172361 | CCDC11 | coiled-coil domain containing 11 | 0.3065 | 0.03578 |
| 278, 377 | 4884 | ENSG00000171246 | NPTX1 | neuronal pentraxin I | 0.3088 | 0.03202 |
| 279, 378 | 23075 | ENSG00000133789 | SWAP70 | SWAP-70 protein | 0.3097 | 0.03146 |
| 280, 379 | 10396 | ENSG00000124406 | ATP8A1 | ATPase, aminophospholipid transporter | 0.3107 | 0.03182 |
| 281, 380 | 2624 | ENSG00000179348 | GATA2 | GATA bindingprotein 2 | 0.1712 | 0.02929 |
| 282 | — | ENSG00000183427 | — | ENSG00000183427 | 0.4291 | 0.00588 |

GeneID is a unique identifier assigned to a record in Entrez Gene. Entrez Gene provides these tracked, unique identifiers for genes and reports information associated with those identifiers for unrestricted public use at the National Center for Biotechnology Information Website. Ensembl GeneID is a unique stable gene identifier of the Ensembl database, publicly available at the Ensembl Genome Browser. See Hubbard, et at. (2007) Nucleic Acids Res. 35 (Database Issue): D610-7.

### Example 3

### Methodology for Assessment of Oocyte Competence

[0233] To evaluate the competence of an oocyte for implantation or fertilization, a morphological assessment may be made of the oocyte, cytogenetic analysis of the polar body, and/or microarray analysis of cumulus cells associated with the oocyte. See FIG. 1.

[0234] The oocyte may be removed from the cumulus cells and polar body associated with it for morphological assessment and karyotyping.

[0235] The polar body may be removed from the oocyte and cumulus cells in which it is associated, the cells lysed and whole genome amplification followed by cytogenetic analysis via array comparative genomic hybridization (aCGH) to detect genomic copy number variations at a higher resolution level than chromosome-based genomic hybridization (CGH).

[0236] The cumulus cells may be removed from the oocyte and polar body. The RNA may be purified from the cumulus cells and reverse transcription of the mRNA into cDNA. An aliqout of the cDNA may undergo real-time PCR and the Taqman Low Density Array (TLDA) for gene expression analysis. Another aliqout of the cDNA may undergo at least about two rounds of RNA amplification and then microarray analysis. For example, nucleic acid from a test sample and normal reference sample are labeled differentially, using different fluorophores, and hybridized to several thousand probes. The probes are derived from most of the known genes and non-coding regions of the genome, printed on a glass slide. The ratio of the fluorescence intensity of the test to that of the reference nucleic acid is then calculated, to measure the copy number changes for a particular location in the genome. Using this method, copy number changes at a level of 5-10 kilobases of DNA sequences can be detected. The high-resolution CGH (HR-CGH) arrays may detect structural variations (SV) at resolution of 200 bp. This method allows one to identify new recurrent chromosome changes such as microdeletions and duplications in found in birth defects due to chromosome aberrations. See Urban, et al. (2006) Proc. Natl. Acad. Sci. 103: 4534-39.

[0237] Cytogenetic Results:

[0238] The aCGH results from 26 first PBs (from 9 patients) with an average maternal age: 38.3 years (age range: 30-46 years) comprising 36 years or less: 3 women (av. age: 32.7 years) and 37 years or more: 6 women (av. age: 41.2 years) yielded 13 PBs/oocytes normal after aCGH and 13 PBs/oocytes abnormal after aCGH. The abnormal chromosome samples showed whole chromosome non-disjunction and unbalanced chromatid predivision as well as chromosomes of all sizes affected by aneuploidy

[0239] Cumulus Cell Gene Expression:

[0240] The cumulus cells (CCs) from 3 normal and 3 aneuploid oocytes assessed including 3 patients, age range: 32-41 years, average age: 38 years. These samples showed lower mRNA quantities in CCs from aneuploid oocytes. In total, 29,098 genes were examined with 17,388 genes consistently expressed in all cumulus cell investigated and 729 genes exhibiting significant differences in expression between aneuploid and normal groups (606 P<0.05, 123 P<0.01). Of these 729 genes, 272 genes were over-expressed and 457 genes were under-expressed. The microarray results were validated by via real-time PCR using an independent set of samples and TaqMan low density arrays (TLDAs) that allows for a simultaneous analysis of large numbers of genes. Of these genes examined, 94 genes were selected from array data and 2 housekeeping genes for further analysis.

[0241] The cumulus cells from 10 normal and 10 aneuploid oocytes were examined including 6 patients, age range: 30-46 years, average age: 38. 7 years. 60 out of the 94 genes were concordant with the microarray data. Of note, 14 genes (e.g., B3GALNT2, C22orf29, CCL16, DCBLD1, DCC1, DHX9, OTUD5, RBBP6, SEPT11, SLC25A36, SPSB2, TACSTD2, Unassigned, and TP53I3) exhibited highly significant differential expression (P<0.01) with a large mRNA copy number fluctuations (FC>4) and were down-regulated in cumulus cells of aneuploid oocytes. These genes include receptors, transferases, signaling molecules, nucleic acid, binding, cytoskeletal proteins, and carrier proteins.

[0242] Conclusions:

[0243] The inventors used arrays and real-time PCR to conduct a comprehensive analysis of cumulus cell transcriptome allowing for an insight into follicular microenvironment of aneuploid oocytes. Aneuploid oocytes are associated with transcriptionally quiescent and less proliferative cumulative cells. Further, the abnormal expression of genes regulating metabolism, cell-cell communication, hypoxia, and apoptosis was found. Thus there is a relationship between follicular microenvironment and oocyte aneuploidy. In particular, fourteen genes are useful targets for non-invasive test development (e.g., B3GALNT2, C22orf29, CCL16, DCBLD1, DCC1, DHX9, OTUD5, RBBP6, SEPT11, SLC25A36, SPSB2, TACSTD2, Unassigned, and TP53I3) For example, the SPSB2 gene (e.g., UniProtKB Q99619) expression in cumulus cells correlated with oocyte chromosome status and potential to lead to live birth.

### Example 4

### Oocyte Chromosome Status Determined by Cumulus Cell Analysis

[0244] Oocyte chromosome status was determined by first polar body (PB) biopsy, followed by analysis using a well-validated microarray comparative genomic hybridization (aCGH) method. This approach allowed identification of aneuploidy affecting any chromosome in the corresponding oocyte with high accuracy. CCs were removed mechanically prior to PB biopsy. Following RNA extraction, and RNA amplification, cumulus cell gene expression was quantified. Initially, cumulus cell gene expression was analyzed via microarray, providing an assessment of over 29,000 separate gene transcripts. Results were later confirmed for 94 candidate genes using reverse transcription followed by real-time polymerase chain reaction, a process considered to be the gold standard for quantification of mRNA transcript copy numbers.

### Results

### Cytogenetic Analysis of First PBs

[0245] Microarray comparative genomic hybridization (aCGH) is a DNA-based method, which provides data on the relative copy number of every chromosomal region in a single experiment. Because aCGH analysis of single PBs involves placing the cells intact in tubes, artifacts that affect methods such as fluorescent in situ hybridization, which require the spreading of PBs on microscope slides, are eliminated. Hence the aCGH approach for PB analysis is both reliable and also comprehensive. High accuracy was confirmed by the recent ESHRE-sponsored proof of principle study that examined this technology. Geraedts (2010) Hum Reprod 25(Suppl 1): i17-i18.

[0246] A total of 26 first polar bodies biopsied from oocytes donated from 9 women of an average age of 38.3 years (range: 32-46 years), who were undergoing IVF due to male factor infertility and tubal problems (i.e., no ovarian involvement) were analyzed. aCGH was successful for all 26 first PBs. Cumulus cells were also collected from these oocytes.

[0247] A total of 13 first polar bodies and therefore their corresponding oocytes were characterized as being abnormal, with the remainder being classified as normal. The abnormal oocytes were derived from 8 women, whose average age was 39.4 years (age range: 32-46 years). Analysis of the obtained data confirmed the presence of two main mechanisms leading to maternal aneuploidy; whole chromosome non-disjunction and unbalanced chromatid predivision. Chromosomes of all sizes were found to participate in aneuploidy events. The results from the aCGH analysis of the 13 aneuploid first PBs are shown in Table 4.

TABLE 4
Molecular karyotypes of the 13 aneuploid polar bodies and gene expression
analysis methodology for the corresponding cumulus cells.

| | | | | | Cumulus Cell |
|---|---|---|---|---|---|
| | | | | | gene |
| | Maternal | Polar Body | Polar Body | Oocyte | expression |
| Patient no. | Age | Number | molecular karyotype | characterization | analysis |
| 1 | 32 | 3 | 24, X, +16 | Abnormal | Microarray |
| 2 | 36 | 3 | 24, X, +X | Abnormal | Real-time PCR |
| | | 4 | 23, X, +4cht, +5cht, +7, −15, | Abnormal | Real-time PCR |
| | | | −20cht | | |
| | | 6 | 22, X, −18cht, −21 | Abnormal | Real-time PCR |
| 3 | 39 | 3 | 23, X, −13cht | Abnormal | Real-time PCR |
| | | 4 | 22, X, −3 | Abnormal | Real-time PCR |
| 4 | 39 | 1 | 22, X, −15 | Abnormal | Real-time PCR |
| | | 3 | 24, X, +20 | Abnormal | Real-time PCR |
| 5 | 40 | 7 | 22, X, −22 | Abnormal | Microarray |
| 6 | 41 | 1 | 24, X, +17 | Abnormal | Microarray |
| 7 | 42 | 1 | 24, X, +15, −18, −19cht, | Abnormal | Real-time PCR |
| | | | +20 | | |
| | | 5 | 23, X, −16cht, +21cht | Abnormal | Real-time PCR |
| 8 | 46 | 3 | 23, X, +8cht, +19cht | Abnormal | Real-time PCR |

Gene Expression Analysis of CCs from Normal and Aneuploid Oocytes

[0248] Clumps of cumulus cells (30-50 cells) isolated from three normal and three abnormal MII oocytes were subjected to expression microarray analysis. The microarray employed was the Human Genome Survey Microarray (Applied Biosystems). A linear form of amplification, via an in vitro transcription reaction using a highly specific T7 RNA polymerase promoter, was used to produce sufficient mRNA amounts from the cumulus cell clumps for subsequent microarray analysis. For this purpose two different commercially available in vitro transcription kits (TargetAmp 2-round aRNA amplification kit 2.0, Epicentre; NanoAmp RT-IVT labeling kit, Applied Biosystems) were combined. After extensive optimization and validation of the methodology, the amplification protocol was applied to samples of cumulus cells, successfully generating 13-154 μg of RNA (average ˜91 μg), and fragment sizes ranging from less than 50 nucleotides to over 4,000 nucleotides in length, as revealed by analysis with an Agilent Bioanalyzer. Interestingly, the mRNA amount in the cumulus cell (CC) clumps isolated from the aneuploid MII oocytes tended to be lower (13-83 μg, average 39 μg) than that observed for cumulus cell clumps isolated from the chromosomally normal oocytes (132-154 μg, average 143 μg). This finding suggested that CCs enclosing aneuploid oocytes could be less transcriptionally active, compared to those surrounding chromosomally normal oocytes.

[0249] Microarray analysis allowed for the definition of a typical cumulus cell transcriptome, cataloguing all genes expressed in human cumulus cells. Specifically, utilizing a conservative definition for the positive detection of expression for individual genes (signal-to-noise ratio>3), 17,388 of the 29,098 sequences examined were consistently expressed in every cumulus cell sample assessed. The gene expression patterns seen were very similar for all of the cumulus cell clumps examined. However, 729 genes displayed statistically (P<0.05) differential expression levels in CCs derived from the aneuploid versus those derived from the normal oocytes. Of these, a total of 457 genes were down-regulated in the CCs from the aneuploid group, and 272 were up-regulated. Highly significant alterations (P<0.01) in expression patterns were observed for 123 of the above genes, with 91 being down-regulated and 32 being up-regulated.

[0250] Bioinformatic analysis, including classification of expressed genes according to molecular functions and biological processes was accomplished using the PANTHER tool, a database which contains a reference list of all known human genes (Applied Biosystems). Comparisons of differentially expressed gene groups within the PANTHER database demonstrated a highly disproportionate down-regulation of genes encoding for ribosomal, and other nucleic acid binding proteins, transcription factors and other signaling molecules, receptors, transferases and cytoskeletal proteins, in the cumulus cells of the aneuploid oocytes. Conversely, genes encoding proteins involved in ion channels, cell junctions and oxidoreductases were observed to be mostly up-regulated in the cumulus cells of the aneuploid oocytes, versus the ones from the normal oocytes. Together, these genes were participating in the regulation of over 30 biological processes, including signal transduction, translational regulation, protein biosynthesis, metabolism and modification, cell adhesion and communication, membrane traffic, and homeostasis. Additionally, a total of 245 previously uncharacterized genes were shown to be differentially expressed, 113 of which were down-regulated and 132 were up-regulated.

[0251] In order to verify the results obtained from the microarray analysis, a real-time PCR method known as a TaqMan Low Density Array (TLDA, Applied Biosystems) was used. TLDAs are able to simultaneously analyze a larger numbers of genes, compared with conventional real-time PCR approaches, and provide highly accurate quantification of mRNA transcripts. Hence, it was possible to further examine the expression of a total of 96 of the 729 differentially expressed genes, including 2 house-keeping genes (GADPH and HPRT1). Cumulus cells were taken from 10 normal and 10 aneuploid oocytes, categorized after aCGH analysis of the first polar body. The data obtained was normalized using the endogenous house-keeping genes as a control (results were essentially the same regardless of the housekeeping gene used). Of the 94 selected genes, 60 showed expression profiles which were confirmatory of the microarray data. Of these, 14 genes showed highly significant expression differences (P<0.01) and large mRNA transcript copy number fluctuations (>4) between cumulus cells of normal and aneuploid oocytes, during both the microarray and the TLDA experiments. All these 14 genes were down-regulated in the CCs surrounding aneuploid oocytes, and their names and functions are summarized in Table 5.

TABLE 5
Details of the functions of the 14 genes with significantly different expression in
cumulus cells of normal and aneuploid oocytes.

| | | | | | Exemplary |
|---|---|---|---|---|---|
| | | | | | Nucleic Acid/ |
| | Gene | | | | Amino Acid |
| Gene name | Symbol | Gene group | Molecular function | Biological process | (SEQ ID NO) |
| Beta-1,3-N-acetylgalactosaminyltransferase 2 | B3GALNT2 | Transferase | Glycosyltransferase | Protein metabolism | 185/285 |
| Chromosome 22 open reading frame 29 | C22orf29 | Receptor | G-protein coupled | G-protein mediated | 381/382 |
| | | | receptor | signaling; Cell | |
| | | | | proliferation and | |
| | | | | differentiation | |
| Chemokine (C-C motif) ligand 16 | CCL16 | Signalling | Chemokine | Ligand-mediated | 187/287 |
| | | molecule | | signaling | |
| Discoidin, CUB and LCCL domain containing 1 | DCBLD1 | Unclassified | Unclassified | Unclassified | 191/291 |
| Defective in sister chromatid cohesion | DCC1 | Replication origin | Chromatin binding | DNA replication; Cell | 189/289 |
| homolog 1 (S. cerevisiae) | | binding protein | | proliferation and | |
| | | | | differentiation | |
| DEAH (Asp-Glu-Ala-His) box polypeptide 9 | DHX9 | Helicase | RNA helicase | mRNA splicing | 188/288 |
| OTU domain containing 5 | OTUD5 | Ribosomal | Nucleic acid Binding | Sex determination; | 193/293 |
| | | protein | | chromosome segregation | |
| Retinoblastoma binding protein 6 | RBBP6 | Nuclease | Nuclease | mRNA polyadenylation; | 184/284 |
| | | | | Other metabolism | |
| Septin 11 | Septin 11 | Cytoskeletal | Small GTPase/ | Cytokinesis/Apoptosis | 192/292 |
| | | protein | Cytoskeletal protein | | |
| Solute carrier family 25, member 36 | SLC25A36 | Transfer/carrier | Mitochondrial carrier | Small molecule transport | 190/290 |
| | | protein | protein | | |
| SPRY domain-containing SOCS box protein 2 | SPSB2 | Signalling | | Intracellular signaling | 252/351 |
| | | molecule | | cascade/Ubiquitination/ | |
| | | | | Cell surface receptor | |
| | | | | mediated signal | |
| | | | | transduction | |
| Tumor-associated calcium signal transducer 2 | TACSTD2 | Receptor | Receptor | Cell surface receptor | 383/384 |
| | | | | mediated signal | |
| | | | | transduction; Cell | |
| | | | | proliferation and | |
| | | | | differentiation | |
| Unassigned | Unassigned | Helicase | RNA helicase | mRNA splicing | |
| Tumor protein p53 | TP5313 | | Oxidoreductase | Apoptosis; | 385/386 |
| inducible protein 3 | | | activity | Carbohydrate metabolic | 387/388 |
| | | | | process | 389/390 |

[0252] 14 genes were assessed in relation to clinical outcome (i.e., the establishment of a pregnancy leading to a healthy live birth) in a new set of samples. This part of the study took place in a blinded manner, and was achieved by investigating the expression profiles of the 14 genes in a set of 38 CCs corresponding to embryos that were transferred without any chromosome screening. Of these 38 embryos, 18 implanted and produced live births and 20 failed to produce a clinical pregnancy. Among the 14 genes examined, SPSB2 and TP53I3 showed the clearest association with live birth, tending to be up-regulated in the cumulus cells of oocytes which led to successful pregnancies (FIG. 2). These differences in expression between the two sample groups approached statistical significance (P=0.055).

### Example 5

### SPSB2 and TP53I3 Gene Expression Analysis

[0253] Materials and Methods

[0254] Patients and Samples

[0255] This research was conducted using Institutional Review Board approved protocols and with patient signed informed consent. A total of 28 karyotypically normal women participated in this research project. All these women were undergoing ART treatment with or without PGS in three IVF clinics in the USA. These women were aged between 23 and 46 years (average age 32.8 years).

[0256] The patient and sample details of this research are in Table 6 below.

TABLE 6
Patient and sample details. The method used for gene expression analysis is also included.

| Patient | Maternal age | | Oocytes | | Type of poly-A mRNA |
|---|---|---|---|---|---|
| no. | (years) | Indication for ART | processed | No. of CCs examined | analysis |
| 1 | 23 | Unknown | 2 | 2 | TLDAs |
| 2 | 26 | Oocyte donor | 1 | 1 | TLDAs |
| 3 | 27 | Oocyte donor | 1 | 1 | TLDAs |
| 4 | 27 | Endometriosis, Right | 1 | 1 | TLDAs |
| | | Oophorectomy | | | |
| 5 | 28 | Unknown | 2 | 2 | TLDAs |
| 6 | 29 | Endometriosis | 3 | 3 | TLDAs |
| 7 | 30 | Oocyte donor | 5 | 5 inner CC layers | Real-time PCR |
| 8 | 30 | Unknown | 1 | 1 | TLDAs |
| 9 | 30 | LPD, Oligospermia | 2 | 2 | TLDAs |
| 10 | 30 | Oligospermia | 1 | 1 | TLDAs |
| 11 | 30 | Unknown | 2 | 2 | TLDAs |
| 12 | 31 | Oligospermia, Dysmenorrhea | 2 | 2 | TLDAs |
| 13 | 31 | LPD, Dysmenorrhea | 1 | 1 | TLDAs |
| 14 | 33 | Oligospermia | 2 | 2 | TLDAs |
| 15 | 33 | Tubal Factor | 1 | 1 | TLDAs |
| 16 | 34 | Dysmenorrhea | 2 | 2 | TLDAs |
| 17 | 34 | Oligospermia | 2 | 2 | TLDAs |
| 18 | 35 | Unknown | 2 | 2 | TLDAs |
| 19 | 35 | Oligospermia, Dysmenorrhea | 3 | 3 | TLDAs |
| 20 | 35 | Secondary Infertility, Right | 2 | 2 | TLDAs |
| | | Tubal Occlusion | | | |
| 21 | 35 | Amenorrhea | 2 | 2 | TLDAs |
| 22 | 35 | Unknown | 2 | 2 | TLDAs |
| 23 | 35 | Amenorrhea, Hypogonadism | 1 | 1 | TLDAs |
| 24 | 36 | Male factor | 4 | 4 outer and 4 inner CC layers | TLDAs & Real-time PCR |
| 25 | 39 | PGS* due to AMA** | 5 | 4 outer and 5 inner CC layers | TLDAs & Real-time PCR |
| 26 | 41 | Male factor | 3 | 3 inner CC layers | Real-time PCR |
| 27 | 42 | PGS due to AMA | 6 | 3 outer and 6 inner CC layers | TLDAs & Real-time PCR |
| 28 | 46 | PGS due to AMA | 3 | 2 outer and 3 inner CC layers | TLDAs & Real-time PCR |

*PGS—Preimplantation genetic screening
**AMA—Advanced maternal age

[0257] Table 6 shows a summary of the details of this patient group, along with the number of CC samples examined and the type of technique used for mRNA analysis. For patients 7, 24, 25, 26, 27 and 28 (Table 7), the ovarian stimulation protocol consisted of GnRH agonist started in midluteal phase of the previous cycle and recombinant FSH (rFSH). Subsequent oocyte collection took place as described previously (Fragouli et al., 2010). For the remaining patients, the employed stimulation protocols were designed according to what the treating clinicians thought would be the most suited, including a combination of either GnRH agonist or antagonist with recombinant FSH, with or without hMG. Serum estradiol levels and transvaginal ultrasound were used to monitor ovarian response. After administration of hCG for the final follicular maturation, the oocytes were collected 36 hours later.

### Oocyte, PBs and Cumulus Cells

[0258] A total of 26 oocytes (patients 7, and 24-28 in Table 6) had their first PBs biopsied and cytogenetically analyzed with the use of microarray comparative genomic hybridization (aCGH). In addition to the PBs, two clumps of CCs were also removed from 13 of the oocytes. One CC sample consisted of part of the outer layer of the cumulus-oocyte-complex (COC) and the other was taken from the inner layer, in close contact with the oocyte. For the remaining 13 oocytes of this group only the inner layer of CCs was sampled. An additional 38 oocytes (patients 1-6 and 8-23 in Table 7) had clumps of CCs removed mostly from the inner CC layer, but no cytogenetic analysis of first PBs took place for this group of samples. Gene expression in a total of 51 CC clumps was assessed using TaqMan low density arrays (TLDAs) to investigate up to 96 genes per sample, whereas the inner CC layers (26 sets of cell clumps) were used for a more focused real-time PCR experiment assessing just three genes (details described in subsequent sections).

### Sample Processing

[0259] Micromanipulation of PBs and CCs took place in sterile conditions with solutions and equipment treated to remove/inactivate RNA degrading enzymes. Shortly before IVF procedures took place, part of the outer CC layer was removed mechanically with the use of stripper pipettes (51 samples). In some cases (see above) part of the inner layer of CCs was also removed after a brief exposure to hyaluronidase (26 samples). Each CC clump was briefly washed in phosphate buffered saline (Invitrogen, USA) containing 0.1% w/v polyvinyl alcohol (Sigma, USA) and 0.4 U/ml RNasin Plus RNase inhibitor (Promega, USA). The CC clumps were subsequently transferred to microcentrifuge tubes and then immediately frozen and stored at −80° C. until RNA extraction took place. The collection of CCs was performed rapidly so as to minimize mRNA degradation or any induced changes in gene expression. First PBs were biopsied from mature metaphase II oocytes after removal of CCs and prepared for aCGH analysis as described previously (Fragouli et al. 2011a; 2011b).

aCGH Analysis of PBs

[0260] The chromosome complement of biopsied first PBs was examined using aCGH. The procedure took place as described in Fragouli et al., (2011a). Briefly, whole genome amplification was carried out using the SurePlex amplification kit (Rubicon, USA/BlueGnome Ltd, UK) according to the manufacturer's instructions. Amplified DNA from the first PB and previously amplified normal male (46,XY) DNA (SureRef; BlueGnome Ltd, UK) were fluorescently labelled with the use of the Fluorescence Labelling System (BlueGnome Ltd, UK), also according to the manufacturer's instructions. ‘Test’ PB DNA was labelled in Cy3 and the ‘reference’ 46,XY DNA was labelled with Cy5. Test and reference DNA co-precipitation, denaturation, array hybridization and post-hybridization washes all took place as suggested by the manufacturer. The hybridization time was 16 h.

### Scanning and Image Analysis and Interpretation

[0261] A laser scanner (InnoScan 710, Innopsys, Carbonne, France) was used to excite the fluorophores, and to read and store the resulting hybridization images. The MAPIX software (Innopsys, France) was used to control the scanning of the microarray slides. The resulting images were stored in TIFF format file and were analyzed by the BlueFuse Multi analysis software (BlueGnome Ltd, UK), using criteria and algorithms recommended by the manufacturer of the software (Bluegnome Ltd, UK). First PBs and their corresponding oocytes were classified as normal or aneuploid according to these criteria and algorithms (BlueGnome Ltd, UK).

### Cumulus Cell RNA Extraction

[0262] Extraction of RNA for all 51 CC clumps analyzed using TLDAs occurred with the use of the PicoPure RNA Isolation kit (Arcturus, UK). The procedure took place as suggested by the manufacturer with a few modifications. The extracted RNA was eluted to a final volume of 15-30 μl of elution buffer and sample concentration along with the absorption at 260/280 and 260/230 were measured twice, using a Nanodrop spectrophotometer. All samples were stored at −80° C. until TLDAs analysis was carried out. The Quick Extract RNA extraction kit (Epicentre, Cambio, UK) was employed to extract RNA from the 26 samples composed of inner CC layers. These samples subsequently underwent a smaller scale real-time PCR analysis. The Quick Extract RNA extraction protocol followed was a modified version of that described by the manufacturer. Specifically, the amount of the QuickExtract RNA extraction Solution was reduced tenfold, so as to adjust volumes for the subsequent step of cDNA synthesis. It was not possible to measure the concentrations for this set of samples, as almost the entirety of the extracted RNA was used for cDNA synthesis and real-time PCR.

cDNA Synthesis from Total RNA

[0263] RNA was converted to cDNA using the High Capacity cDNA Reverse Transcription kit (Applied Biosystems, UK). In samples with measured concentrations, a total of up to 16 ng of extracted RNA was used per sample. The total sample volume was adjusted to 10 μl with the addition of DEPC water. The rest of the reaction included 2 μl of 10×RT Buffer, 0.8 μl of 25×dNTP Mix (100 mM), 2 μl of 10×RT Random primers, 1 μl of MultiScribe Reverse Transcriptase, and 4.2 μl of nuclease-free H₂O per sample. cDNA synthesis took place by incubating the samples at 25° C. for 10 minutes and at 37° C. for 120 minutes.

### CC Gene Expression Analysis Via TLDAs

[0264] The expression of 96 genes was evaluated in 51 CC clumps (Tables 6 and 7) using TaqMan Low Density Arrays, a microvolume real-time PCR technology (Applied Biosystems, UK).

TABLE 7
Molecular karyotypes of the 26 biopsied first PBs and gene expression analysis methodology
for the corresponding CC's

| | | | | | | CC gene |
|---|---|---|---|---|---|---|
| Patient | PB | PB molecular | Oocyte | Outer | Inner | expression |
| no. | no. | karyotype | characterization | CCs | CCs | analysis |
| 7 | 7-1 | 23, X | Normal | No | Yes | Real-time PCR |
| | 7-2 | 23, X | Normal | No | Yes | |
| | 7-3 | 23, X | Normal | No | Yes | |
| | 7-4 | 23, X | Normal | No | Yes | |
| | 7-5 | 23, X | Normal | No | Yes | |
| 24 | 24-2 | 23, X | Normal | Yes | Yes | TLDAs & |
| | 24-3 | 23, X | Normal | Yes | Yes | Real-time PCR |
| | 24-4 | 23, X, +4cht, +5cht, +7, −15, −20cht | Abnormal | Yes | Yes | |
| | 24-6 | 22, X, −18cht, −21 | Abnormal | Yes | Yes | |
| 25 | 25-1 | 22, X, −15 | Abnormal | Yes | Yes | TLDAs & |
| | 25-2 | 23, X | Normal | Yes | Yes | Real-time PCR |
| | 25-3 | 24, X, +20 | Abnormal | Yes | Yes | |
| | 25-4 | 23, X | Normal | Yes | Yes | |
| | 25-5 | 22, X, +10cht, +15cht, −18 | Abnormal | No | Yes | |
| 26 | 26-1 | 24, X, +19 | Abnormal | No | Yes | Real-time PCR |
| | 26-2 | 23, X, −10cht | Abnormal | No | Yes | |
| | 26-3 | 23, X | Normal | No | Yes | |
| 27 | 27-1 | 24, X, +15, −18, −19cht, +20 | Abnormal | Yes | Yes | TLDAs & |
| | 27-2 | 23, X | Normal | Yes | Yes | Real-time PCR |
| | 27-3 | 23, X | Normal | No | Yes | |
| | 27-4 | 23, X | Normal | Yes | Yes | |
| | 27-5 | 23, X, −16cht, +21cht | Abnormal | No | Yes | |
| | 27-7 | 23, X | Normal | No | Yes | |
| 28 | 28-1 | 23, X | Normal | Yes | Yes | TLDAs & |
| | 28-3 | 23, X, +8cht, +19cht | Abnormal | Yes | Yes | Real-time PCR |
| | 28-4 | 23, X | Normal | No | Yes | |

TABLE 8
ΔCt values for TP53I3 and SPSB2 in inner CC layers removed from normal and aneuploid
oocytes. Low ΔCt values correspond to gene up-regulation, whereas high ΔCt values
correspond to gene down-regulation

| Patient no. | CC no. | Oocyte characterisation | TP53I3 ΔCt | SPSB2 ΔCt | TP53I3 and SPSB2 status in CCs |
|---|---|---|---|---|---|
| 7 | 7-1-CC | Normal | 1.57 | 5.721 | Down-regulated |
| | 7-2-CC | Normal | −0.486 | 4 | Up-regulated |
| | 7-3-CC | Normal | 0.26 | 5.825 | Down-regulated |
| | 7-4-CC | Normal | No result | No result | No result |
| | 7-5-CC | Normal | No result | No result | No result |
| 24 | 24-2-CC | Normal | −0.153 | 3.353 | Up-regulated |
| | 24-3-CC | Normal | −0.575 | 1.964 | Up-regulated |
| | 24-4-CC | Abnormal | 2.115 | 6.932 | Down-regulated |
| | 24-6-CC | Abnormal | No result | No result | No result |
| 25 | 25-1-CC | Abnormal | 0.526 | 5.326 | Down-regulated |
| | 25-2-CC | Normal | 1.422 | 7.066 | Down-regulated |
| | 25-3-CC | Abnormal | 1.666 | 5.403 | Down-regulated |
| | 25-4-CC | Normal | 2.109 | 6.958 | Down-regulated |
| | 25-5-CC | Abnormal | 1.915 | 6.588 | Down-regulated |
| 26 | 26-1-CC | Abnormal | 1.962 | 4.078 | Down-regulated |
| | 26-2-CC | Abnormal | 2.558 | 5.161 | Down-regulated |
| | 26-3-CC | Normal | 2.153 | 5.09 | Down-regulated |
| 27 | 27-1-CC | Abnormal | No result | No result | No result |
| | 27-2-CC | Normal | −1.074 | 2.891 | Up-regulated |
| | 27-3-CC | Normal | −0.401 | 2.51 | Up-regulated |
| | 27-4-CC | Normal | −0.214 | 2.393 | Up-regulated |
| | 27-5-CC | Abnormal | No result | No result | No result |
| | 27-7-CC | Normal | −1.194 | 1.213 | Up-regulated |
| 28 | 28-1-CC | Normal | 0.805 | 5.885 | Down-regulated |
| | 28-3-CC | Abnormal | 0.544 | 6.544 | Down-regulated |
| | 28-4-CC | Normal | −0.506 | 6.027 | Up-regulated |

Samples with ‘No result’ are likely to be due to loss of RNA during the extraction procedure or failure of reverse transcription, since no cDNA amplification was possible for any gene.

TABLE 9
Details of the 58 CC genes associated with aneuploidy following TLDA analysis.

| | | | | | Expression | | |
|---|---|---|---|---|---|---|---|
| | | | | | in | | |
| | | | | | CCs of | | |
| | | | | | aneuploid | | |
| | | | | | oocytes | | |
| | | | | | compared | Relative | |
| | | | | | to CCs | expression | |
| | Gene | | | Biological | of normal | aneuploid/ | |
| Gene name | Symbol | Gene group | Molecular function | process | oocytes | euploid | P-value |
| Annexin A5 | ANXA5 | Transfer/carrier | Annexin, | Lipid, fatty acid | Under- | 0.47 | P < 0.01 |
| | | protein | Transfer/carrier | and steroid | expressed | | |
| | | | protein | metabolism | | | |
| Beta-1,3-N- | B3GALNT2 | Transferase | Glycosyltransferase | Protein metabolic | Under- | 0.15 | P < 0.01 |
| acetylgalactosaminyl- | | | | process | expressed | | |
| transferase 2 | | | | | | | |
| Bardet-Biedl | BBS7 | Membrane Traffic | Unclassified | Unclassified | Under- | 0.24 | P < 0.05 |
| syndrome 7 | | | | | expressed | | |
| BMSI homolog, | BMS1L | Nucleic acid | Unclassified | Nucleobase, | Under- | 0.39 | P < 0.05 |
| ribosome | | binding | | nucleoside, | expressed | | |
| assembly protein | | | | nucleotide and | | | |
| (yeast) | | | | nucleic acid | | | |
| | | | | metabolic process | | | |
| Breast cancer 1, | BRCA1 | Zinc finger | Zinc finger | mRNA | Under- | 0.36 | P < 0.05 |
| early onset | | protein | transcription factor | transcription | expressed | | |
| | | | | regulation/Tumor | | | |
| | | | | suppressor/Cell | | | |
| | | | | cycle control/ | | | |
| | | | | DNA repair | | | |
| Bruno-like 6, | BRUNOL6 | Nucleic acid | Other RNA-binding | mRNA splicing | Under- | 0.12 | P < 0.05 |
| RNA binding | | binding | protein | | expressed | | |
| protein | | | | | | | |
| (Drosophila) | | | | | | | |
| Chromosome 22 | C22orf29 | Receptor | G-protein coupled | G-protein | Under- | | P < 0.01 |
| open reading | | | receptor | mediated | expressed | | |
| frame 29 | | | | signalling/Cell | | | |
| | | | | proliferation and | | | |
| | | | | differentiation | | | |
| Capping protein | CAPZA3 | Cytoskeletal | Non-motor actin | Cell structure | Over- | 2.81 | P < 0.05 |
| (actin filament) | | proteins | binding protein | | expressed | | |
| muscle Z-line, | | | | | | | |
| alpha 3 | | | | | | | |
| CASP8 and | CFLAR | Protease | Cysteine protease | Proteolysis/ | Under- | 0.38 | P < 0.01 |
| FADD-like | | | | Apoptosis | expressed | | |
| apoptosis | | | | | | | |
| regulator | | | | | | | |
| Cell division cycle | CCAR1 | Miscellaneous | Calmodulin related | Oncogenesis | Under- | 0.55 | P < 0.05 |
| and apoptosis | | function | protein | | expressed | | |
| regulator 1 | | | | | | | |
| Cell division cycle | CDC2 | Receptor | Serine/threonine | Cell cycle control | Under- | 0.18 | P < 0.05 |
| 2, G1 to S and | | | protein kinase | | expressed | | |
| G2 to M | | | receptor | | | | |
| Chemokine | CCL16 | Signalling | Chemokine | Ligand-mediated | Under- | 0.16 | P < 0.01 |
| (C—C motif) | | molecule | | signalling/ | expressed | | |
| ligand 16 | | | | Cytokine and | | | |
| | | | | chemokine | | | |
| | | | | mediated | | | |
| | | | | signaling pathway | | | |
| | | | | and immunity | | | |
| Chondroitin | CSPG6 | Nucleic acid | Chromatin/ | DNA replication | Under- | 0.36 | P < 0.05 |
| sulfate | | binding | Chromatin- | and repair/ | expressed | | |
| proteoglycan 6 | | | binding protein | Chromatin | | | |
| (bamacan) | | | | packaging | | | |
| | | | | and remodelling/ | | | |
| | | | | Chromosome | | | |
| | | | | segregation | | | |
| Cofilin | CFLP1 | Cytoskeletal | Non-motor actin | Cell structure | Over- | 2.69 | P < 0.05 |
| pseudogene 1 | | protein | binding protein | | expressed | | |
| Colony | CSF1R | Kinase | Protein kinase/ | Cell surface | Under- | 0.48 | P < 0.05 |
| stimulating factor | | | Tyrosine protein | receptor mediated | expressed | | |
| 1 receptor, | | | kinase receptor | signal | | | |
| formerly | | | | transduction/ | | | |
| McDonough | | | | Receptor protein | | | |
| feline sarcoma | | | | tyrosine kinase | | | |
| viral (v-fms) | | | | signaling | | | |
| oncogene | | | | pathway; | | | |
| homolog | | | | Immunity and | | | |
| | | | | defense/Cell | | | |
| | | | | proliferation and | | | |
| | | | | differentiation | | | |
| Cyclin-dependent | CDK4 | Kinase | Non-receptor | Mitosis/Protein | Under- | 0.46 | P < 0.01 |
| kinase 4 | | | serine/threonine | phosphorylation/ | expressed | | |
| | | | protein kinase | Cell cycle control | | | |
| Defective in sister | DSCC1/ | Chromatin | Replication origin | DNA replication/ | Under- | 0.20 | P < 0.01 |
| chromatid | DCC1 | binding | binding protein | Cell proliferation | expressed | | |
| cohesion homolog | | | | and differentiation | | | |
| 1 (S. cerevisiae) | | | | | | | |
| DEAH | DHX9 | Helicase | RNA helicase | mRNA splicing | Under- | 0.18 | P < 0.01 |
| (Asp-Glu-Ala-His) | | | | | expressed | | |
| box | | | | | | | |
| polypeptide 9 | | | | | | | |
| Discoidin, CUB | DCBLD1 | Oxidoreductase | Enzyme regulator | Signal | Under- | 0.23 | P < 0.01 |
| and LCCL domain | | | activity | transduction/cell- | expressed | | |
| containing 1 | | | | cell signalling | | | |
| EPH receptor B2 | EPHB2 | Receptor | Tyrosine protein | Cell proliferation | Under- | 0.24 | P < 0.05 |
| | | | kinase receptor | and | expressed | | |
| | | | | differentiation/ | | | |
| | | | | Protein | | | |
| | | | | phosphorylation/ | | | |
| | | | | Receptor protein | | | |
| | | | | tyrosine kinase | | | |
| | | | | signaling pathway | | | |
| ERO1-like protein | ERO1L | Oxidoreductase | Oxidoreductase | Protein folding/ | Over- | 2.21 | P < 0.05 |
| alpha | | | | Electron | expressed | | |
| | | | | transport; | | | |
| | | | | Intracellular | | | |
| | | | | protein | | | |
| | | | | traffic/General | | | |
| | | | | vesicle transport | | | |
| F-box protein 10 | FBXO10 | Ligase | Ubiquitin-protein | Protein metabolic | Under- | 0.27 | P < 0.05 |
| | | | ligase activity | process | expressed | | |
| Gamma- | GABRB2 | Receptor | GABA receptor/ | Ligand-mediated | Over- | 2.45 | P < 0.05 |
| aminobutyric acid | | | Ion channel | signalling/Anion | expressed | | |
| (GABA) A | | | | transport | | | |
| receptor, beta 2 | | | | | | | |
| Golgi membrane | GOLPH2/ | Membrane traffic | Molecular function | Biological process | Under- | 0.39 | P < 0.01 |
| protein 1 | GOLM1 | | unclassified | unclassified | expressed | | |
| Heat shock | HSPB6 | Chaperone | Other chaperones | Stress response/ | Under- | 0.61 | P < 0.05 |
| protein, alpha- | | | | Protein folding | expressed | | |
| crystallin-related, B6 | | | | | | | |
| Kallikrein-related | KLK8 | Protease | Serine protease | Proteolysis/Cell | Under- | 0.39 | P < 0.01 |
| peptidase 8 | | | | cycle control/Cell | expressed | | |
| | | | | proliferation and | | | |
| | | | | diffentiation/ | | | |
| | | | | Neurogenesis | | | |
| La | LARP2 | Ribonucleoprotein | RNA binding | Nucleobase, | Under- | 0.37 | P < 0.01 |
| ribonucleoprotein | | | | nucleoside, | expressed | | |
| domain family, | | | | nucleotide and | | | |
| member 2 | | | | nucleic acid | | | |
| | | | | metabolic process | | | |
| Mov1011, | MOV10L1 | Helicase | Helicase | Cell cycle/Protein | Under- | 0.19 | P < 0.05 |
| Moloney | | | | metabolic process | expressed | | |
| leukaemia virus | | | | | | | |
| 10-like 1, | | | | | | | |
| homolog (mouse) | | | | | | | |
| Myotrophin | MTPN | Oxidoreductase | Molecular function | Biological process | Under- | 0.31 | P < 0.01 |
| | | | unclassified | unclassified | expressed | | |
| Nuclear receptor | NRIP3 | Protease | Transcription | mRNA | Under- | 0.28 | P < 0.01 |
| interacting protein | | | cofactor | transcription | expressed | | |
| 3 | | | | regulation | | | |
| Nucleosome | NAP1L4 | Phosphatase | Phosphatase | Chromatin | Under- | 0.42 | P < 0.05 |
| assembly protein | | | inhibitor | packaging and | expressed | | |
| 1-like 4 | | | | remodelling/ | | | |
| | | | | Apoptosis/DNA | | | |
| | | | | replication | | | |
| OTU domain | OTUD5 | Nucleic acid | Nucleic acid | Chromosome | Under- | 0.24 | P < 0.01 |
| containing 5 | | binding | Binding/other | segregation | expressed | | |
| | | | protease | | | | |
| Pogo transposable | POGZ | Nulceic acid | Other nucleic | Other mRNA | Under- | 0.06 | P < 0.05 |
| element with ZNF | | binding | acid binding | transcription/ | expressed | | |
| domain | | | | Developmental | | | |
| | | | | processes | | | |
| Potassium | KCNT2 | Ion channel | Voltage-gated | Cation transport | Under- | 0.37 | P < 0.05 |
| channel, | | | potassium channel | | expressed | | |
| subfamily T, | | | | | | | |
| member 2 | | | | | | | |
| Retinoblastoma | RBBP6 | Nuclease | Nuclease | mRNA | Under- | 0.15 | P < 0.01 |
| binding protein 6 | | | | polyadenylation/ | expressed | | |
| | | | | Other metabolism | | | |
| Retinoid-binding | RBP7 | Transfer/carrier | Other | Lipid and fatty | Under- | 0.33 | P < 0.05 |
| protein 7 | | protein | transfer/carrier | acid transport/ | expressed | | |
| | | | protein | Vitamin/cofactor | | | |
| | | | | transport/Steroid | | | |
| | | | | hormone- | | | |
| | | | | mediated | | | |
| | | | | signaling/ | | | |
| | | | | Transport | | | |
| RNA | RPUSD3 | Lyase | Synthase/Lyase | rRNA | Under- | 0.37 | P < 0.05 |
| pseudouridylate | | | | metabolism | expressed | | |
| synthase domain | | | | | | | |
| containing 3 | | | | | | | |
| Septin 11 | Septin 11 | Cytoskeletal | Small GTPase | Cytokinesis | Under- | 0.23 | P < 0.01 |
| | | protein | | | expressed | | |
| SET binding | SBF2 | Phosphatase | Other | Phospholipid | Under- | 0.49 | P < 0.05 |
| factor 2 | | | phosphatase | metabolism/ | expressed | | |
| | | | | General vesicle | | | |
| | | | | transport | | | |
| Solute carrier | SLC12A2 | Transporter | Other transporter/ | Cation transport | Under- | 0.19 | P < 0.05 |
| family 12 | | | Cation transporter | | expressed | | |
| (sodium/potassium/ | | | | | | | |
| chloride | | | | | | | |
| transporters), | | | | | | | |
| member 2 | | | | | | | |
| Sorting nexin 10 | SNX10 | Membrane traffic | Membrane traffic | Intracellular | Over- | 2.52 | P < 0.05 |
| | | | regulatory protein | protein traffic | expressed | | |
| splA/ryanodine | SPSB2 | Signalling | Signalling molecule | Cell surface | Under- | 0.23 | P < 0.01 |
| receptor domain | | molecule | | receptor linked | expressed | | |
| and SOCS box | | | | signal | | | |
| containing 2 | | | | transduction/ | | | |
| | | | | Intracellular | | | |
| | | | | signaling cascade/ | | | |
| | | | | Ubiquitination | | | |
| Stearoyl-CoA | SCD5 | Oxidoreductase | Other | Fatty acid | Over- | 1.61 | P < 0.05 |
| desaturase 5 | | | oxidoreductase | metabolism | expressed | | |
| Suppression of | ST13 | Chaperone | Chaperone | Protein folding | Under- | 0.53 | P < 0.05 |
| tumourigenicity | | | | | expressed | | |
| 13 (colon carcinoma) | | | | | | | |
| (Hsp70 interacting | | | | | | | |
| protein) | | | | | | | |
| SWAP-70 protein | SWAP70 | Nucleic acid | Other nucleic acid | B-cell- and a | Under- | 0.31 | P < 0.05 |
| | | binding | binding | ntibody-mediated | expressed | | |
| | | | | immunity/DNA | | | |
| | | | | recombination | | | |
| Synaptotagmin | SYT16 | Membrane traffic | Membrane traffic | Exocytosis | Over- | 1.45 | P < 0.05 |
| XVI | | | regulatory protein | | expressed | | |
| Synaptotagmin | SYT9 | Membrane traffic | Membrane traffic | Neurotransmitter | Under- | 0.36 | P < 0.01 |
| IX | | | regulator protein | release/Regulated | expressed | | |
| | | | | exocytosis | | | |
| Transmembrane | TMEM57 | Cytoskeletal | Actin binding | Neurogenesis/ | Under- | 0.30 | P < 0.05 |
| protein 57 | | protein | cytoskeletal protein/ | Chromosome | expressed | | |
| | | | Other microtubule | segregation | | | |
| | | | family cytoskeletal | | | | |
| | | | protein | | | | |
| Tropomyosin 2 | TPM2 | Cytoskeletal | Actin binding | Cell motility/Cell | Under- | 0.46 | P < 0.01 |
| (beta) | | protein | motor protein | structured/Muscle | expressed | | |
| | | | | contraction/ | | | |
| | | | | Muscle | | | |
| | | | | development | | | |
| Tumour-associated | TACSTD2 | Receptor | Receptor | Cell surface | Under- | 0.06 | P < 0.01 |
| calcium signal | | | | receptor mediated | expressed | | |
| transducer 2 | | | | signal | | | |
| | | | | transduction/Cell | | | |
| | | | | proliferation and | | | |
| | | | | differentiation | | | |
| Tumour necrosis | TNFSF7 | Signalling | Cytokine | Ligand-mediated | Over- | 2.18 | P < 0.05 |
| factor (ligand) | | molecule | | signaling/ | expressed | | |
| superfamily, | | | | B-cell-and | | | |
| member 7 | | | | antibody-mediated | | | |
| | | | | immunity | | | |
| Tumor protein | TP53I3 | Oxidoreductase | Dehydrogenase | Carbohydrate | Under- | 0.48 | P < 0.01 |
| p53 inducible | | | | metabolism/ | expressed | | |
| protein 3 | | | | Apoptosis | | | |
| Tumour protein, | TPT1 | Cytoskeletal | Non-motor | Immunity and | Over- | 2.06 | P < 0.05 |
| translationally- | | protein | microtubule | defense | expressed | | |
| controlled 1 | | | binding protein | | | | |
| UDP | UGT1A8 | Transferase | Glycosyltransferase | Other | Under- | 0.16 | P < 0.05 |
| glucuronosyltransferase | | | | polysaccharide | expressed | | |
| 1 family, | | | | metabolism/ | | | |
| polypeptide | | | | Steroid hormone | | | |
| A9; UDP | | | | metabolism | | | |
| glucuronosyltransferase | | | | | | | |
| 1 family, | | | | | | | |
| polypeptide | | | | | | | |
| A5; UDP | | | | | | | |
| glucuronosyltransferase | | | | | | | |
| 1 family, | | | | | | | |
| polypeptide | | | | | | | |
| A10; UDP | | | | | | | |
| glucuronosyltransferase | | | | | | | |
| 1 family, | | | | | | | |
| polypeptide | | | | | | | |
| A6; UDP | | | | | | | |
| glucuronosyltransferase | | | | | | | |
| 1 family, | | | | | | | |
| poly | | | | | | | |
| Uveal autoantigen | UACA | Transfer/carrier | Unclassified | Unclassified | Under- | 0.16 | P < 0.05 |
| with coiled-coil | | protein | | | expressed | | |
| domains and | | | | | | | |
| ankyrin repeats | | | | | | | |
| Vacuolar protein | VPS25 | Membrane traffic | Unclassified | Nucleoside, | Under- | 0.29 | P < 0.05 |
| sorting 25 | | | | nucleotide and | expressed | | |
| (S. Cerevisiae) | | | | nucleic acid | | | |
| | | | | metabolism/ | | | |
| | | | | Protein | | | |
| | | | | metabolism and | | | |
| | | | | modification/ | | | |
| | | | | Intracellular | | | |
| | | | | protein traffic/ | | | |
| Zinc finger E-box | TCF8/ | KRAB box | KRAB box | DNA binding/ | Under- | 0.14 | P < 0.05 |
| binding | ZEB1 | transcription | transcription | transcription | expressed | | |
| homeobox 1 | | factor | factor | factor activity | | | |
| ZW10 | ZW10 | Cytoskeletal | Other microtubule | Developmental | Under- | 0.50 | P < 0.05 |
| kinetochore | | protein | family cytoskeletal | processes/ | expressed | | |
| associated, | | | protein | Chromosome | | | |
| homolog | | | | segregation | | | |
| (Drosophila) | | | | | | | |

[0265] TLDA analyses took place as described previously (Fragouli et al., 2010). The customized TLDA cards consisted of 384 (4×96) wells pre-loaded with specified sequence detection (TaqMan) probes. The probes included were chosen based upon the results of a previous series of gene expression microarray experiments. The microarray analyses had assessed the relative expression levels of ˜30,000 mRNA transcripts in CCs surrounding normal and aneuploid oocytes and highlighted 729 genes that displayed apparent alterations in transcript number in CCs associated with chromosomally abnormal oocytes (data not shown). Ninety four of these genes were selected for further analysis using TLDAs (Table 9). Additionally, two house-keeping genes, glyceraldhyde-3-phosphate dehydrogenase (GADPH) and hypoxanthinine phopsphoribosyltransferase 1 (HPRT1) were examined.

[0266] Pre-amplification of cDNA samples took place in a thermocycler, using a pool of all 96 TaqMan assays and TaqMan Preamp Master Mix (×2) (Applied Biosystems, UK). Reactions were prepared as suggested by the manufacturer and pre-amplification occurred under the following conditions: 10 min hold at 95° C. followed by 14 cycles of 15 sec at 95° C. and 4 minutes at 60° C. 2× TaqMan Gene Expression Master Mix (Applied Biosystems, UK) was used during the final real-time PCR step, which took place using the following set of conditions: 50° C. for 2 minutes, 95° C. for 10 minutes, and 40 cycles of 95° C. for 15 sec and 60° C. for 1 minute. ΔCt values were determined by normalization to both house-keeping genes, using the RQ SDS manager software (Applied Biosystems, UK). Replicate analyses were performed for every sample, such that the expression of all 96 genes were assessed in each sample four times.

### CC Gene Expression Analysis Via Real-Time PCR

[0267] A set of smaller scale real-time PCR experiments was used to examine the expression of three genes in the 26 additional samples composed of the inner layer of CCs from oocytes with aCGH PB analysis (Tables 6 and 7). The examined genes included the tumor protein p53 inducible protein 3 (TP53I3), the splA/ryanodine receptor domain and SOCS box containing 2 (SPSB2), and the housekeeping gene HPRT1. Real-time PCR took place with the use of pre-designed TaqMan gene expression assays (Applied Biosystems, UK) which were available for all three genes (TP53I3: Hs00936520_m1; SPSB2: Hs00261880_m1; HPRT1: Hs01003267_m1). Triplicate amplification reactions were set-up for all three genes in each of the 26 CC samples. Each reaction contained 2 μl of cDNA, 7 μl of nuclease-free H₂O, 10 μl of Taq-Man Gene Expression Mastermix (Applied Biosystems, UK), and 1 μl of the 20× Taq-Man Gene expression Assay (Applied Biosystems, UK), for a total volume of 20 μl. The thermal cycler used was a StepOne Real Time PCR System (Applied Biosystems, UK), and the following conditions were employed: incubation at 50° C. for 2 minutes, incubation at 95° C. for 10 minutes, and then 45 Cycles of 95° C. for 15 sec and 60° C. for 1 minute.

### Statistical Analysis

[0268] The TLDA data obtained were first normalized against the two housekeeping genes GADPH and HPRT1. Subsequently, RealTime StatMiner™ version 3 software (Integromics™ SL, Spain) was employed for TLDA data analysis. Simple t-tests were also used to compare the expression of the 94 selected genes in CCs coming from normal and aneuploid oocytes. Additionally, a two-tailed t-test was employed when the expression of TP53I3 and SPSB2 was compared between CCs derived from aneuploid oocytes and normal oocytes. The same approach was used to assess the expression of these two genes in CCs associated with oocytes that led to live births and those that failed to implant. For the smaller scale real-time PCR experiments, the ΔCt values for TP53I3 and SPSB2 were determined by normalizing against the housekeeping gene (HPRT1), and were further analyzed with the use of the StepOne Software v2.1 (Applied Biosystems, UK).

### Results

### Cytogenetic Analysis of Polar Bodies

[0269] Microarray CGH (aCGH) was employed for the comprehensive cytogenetic examination of a total of 26 first PBs. The corresponding metaphase II oocytes were generated by six women whose average age was 39 years (age range: 30-46 years). These women were undergoing ART procedures either due to male factor or tubal infertility (i.e. no ovarian involvement was present) with or without PGS. The obtained molecular karyotypes were used to separate the CC clumps (outer and/or inner layers) into two groups, one including samples removed from metaphase II oocytes characterized as haploid normal (23,X), and another including samples removed from chromosomally abnormal oocytes.

[0270] Table 8 shows the cytogenetic results obtained after the aCGH analysis of the 26 first PBs. A total of 10 first PBs and therefore their corresponding oocytes were characterized as being aneuploid, with the remainder being classified as normal. Thorough analysis of the aCGH data confirmed the presence of two separate mechanisms leading to aneuploidy of female origin, whole-chromosome non-disjunction and unbalanced chromatid predivision. Nine of the 22 errors scored were due to the malsegregation of entire chromosomes while the remainder were attributed to the unbalanced predivision of single chromatids. Chromosomes of all sizes were found to participate in aneuploidy events, and losses as well as gains were seen.

TLDA Analysis of Outer Cumulus Cell Layers from Normal and Aneuploid Oocytes

[0271] Gene expression in a set of 13 outer CC layers was examined. Seven clumps of CCs were removed from metaphase II oocytes whose molecular karyotypes was shown to be 23,X (normal) via aCGH (age range 36-46, mean 40.0), whereas the remaining 6 CC clumps were associated with aneuploid oocytes (age range 36-46, mean 39.7). Details of the chromosome errors scored in the corresponding first PBs are shown in Table 8. These oocytes were generated by four of the participating patients (24, 25, 26 and 28 in Table 8).

[0272] Comparisons took place to determine if the chromosomal status of the oocytes affected the quantities of specific gene transcripts in CCs. Of the 94 selected genes, 58 showed expression profiles which were confirmatory of the initial microarray data. Forty nine of the 58 genes were under-expressed in the CCs removed from aneuploid oocytes, whereas the remainder were over-expressed. In many cases the effect of chromosome errors appeared to be relatively weak, however, two genes not only showed a significant difference in expression associated with oocyte aneuploidy (P<0.05), but also had relatively large mRNA copy number fluctuations (FC>2-fold). Both of these genes, TP53I3 and SPSB2, were under-expressed in the CCs surrounding aneuploid oocytes. Classification of both these genes according to molecular function and biological process was accomplished using the PANTHER tool (Applied Biosystems), a database which contains a reference list of all known human genes. Hence, TP53I3 was classified as a dehydrogenase involved in the regulation of carbohydrate metabolism and apoptosis, whereas SBSB2 was classified as a signalling molecule participating in cell-surface mediated signal transduction, intracellular signalling and ubiquitination.

Real-Time Time PCR Analysis of Inner Cumulus Cell Layers from Normal and Aneuploid Oocytes

[0273] To further investigate the expression of both TP53I3 and SPSB2 in CCs of normal and chromosomally abnormal oocytes, a series of more focused real-time PCR experiments were carried out, concentrating on analysis of the layers of CCs closest to the oocyte. Results were obtained for a total of 21 inner CC layers, 14 of which were removed from chromosomally normal metaphase II oocytes (mean female age 38.6 years), and the remaining 7 from aneuploid oocytes (mean female age 40.1 years). Delta Ct's (ΔCt) were calculated by subtracting the Ct of either TP53I3 or SPSB2 from the Ct of the house-keeping HPRT1 gene for each of the CC samples. These ΔCt values are shown in Table 9, and for the CCs of aneuploid oocytes ranged from 0.5-2.6 for TP53I3 and 4.1-6.9 for SPSB2, while for the CCs of the chromosomally normal oocytes they varied from −1.2 to 2.2 for TP53I3 and 1.2-7.1 for SPSB2. Lower ΔCt values correspond to higher levels of gene expression, whereas high ΔCt values are associated with lower numbers of mRNA transcripts.

[0274] The real-time PCR data was concordant with the results obtained from outer CC layers obtained using TLDAs. Both genes were down-regulated in the inner CC layers of aneuploid oocytes, and up-regulated in 8 of the 14 inner CC layers taken from normal metaphase II oocytes. There were, however, 6 CC samples (7-1, 7-3, 25-2, 25-4, 26-3 and 28-1) removed from apparently normal oocytes, for which both SPSB2 and TP53I3 had an expression profile similar to that seen for CCs associated with aneuploid oocytes. The expression patterns seen for SPSB2 and TP53I3 in CCs of normal and aneuploid oocytes are illustrated in the graph of FIG. 1. Although cumulus cell gene expression analysis was not able to achieve a perfect classification of the corresponding oocytes into ‘normal’ and ‘aneuploid’ categories, a degree of separation was achieved. In the case of TP53I3, expression tended to be significantly lower amongst CCs associated with aneuploid oocytes (P=0.01). A non-significant trend towards lower expression was observed for SPSB2 (see FIG. 9).

### Cumulus Cell Expression of SPSB2 and TP53I3 and Clinical Outcome

[0275] As well as assessing the expression of SPSB2 and TP53I3 in relation to oocyte aneuploidy, we were also able to evaluate whether mRNA transcript levels for these two genes were associated with clinical outcome (i.e. the establishment of a pregnancy leading to a healthy live birth). The expression of SPSB2 and TP53I3 was assessed in a new set of 38 outer CC layers, which were examined using TLDAs. The 38 CC samples were derived from oocytes which produced embryos that were transferred without any chromosome screening. The embryos were generated by 22 women (patients 1-6 and 8-23 in Table 7). All cycles involved either single embryo transfer, transfer of two embryos followed by no pregnancy, or transfer of two embryos followed by birth of dizygotic twins. Thus the ultimate fate of each transferred embryo was known. Analysis of gene expression and outcome took place in a blinded manner. A total of 18 of the transferred embryos implanted successfully and resulted in healthy live births (mean maternal age was 32.0 years), whilst no pregnancy ensued after the transfer of the remaining 20 embryos (mean female age was 30.4 years). The day of transfer varied depending on embryo quality from days 3 to 5.

[0276] The expression profiles of TP53I3 and SPSB2 were compared between the CCs of embryos which led to live births and those who failed to implant. Of the two genes, SPSB2 showed the clearest association with successful pregnancy, tending to be up-regulated in the CCs of oocytes which led to live births. These differences in expression between the two sample groups approached statistical significance (P=0.054 two tailed t-test), and are illustrated in the box plot shown in FIG. 8.

### Discussion

[0277] The combination of expression microarrays and a new innovation in real-time PCR (TLDAs) provided for the first time a detailed insight into the follicular microenvironment of oocytes that become aneuploid. It was evident from the obtained data that the cumulus cells of the aneuploid oocytes tend to be less transcriptionally active and not as proliferative compared to the CCs of the normal oocytes.

[0278] Cumulus cells are biologically distinct from other follicular cells and perform the specialized role of supporting oocyte growth and maturation, via the transmission of signals and the supply of nutrients and other bio-molecules. The down-regulation of genes involved in transcription and protein translation would likely lead to insufficient cellular proliferation. An example is the DHX9 gene, a transcriptional co-activator that functions as a bridging factor between transcription factors/co-factors by binding to promoter sequences. It is also intimately involved in several transcriptional/translational processes relevant to the role of cumulus cells in oocyte support during folliculogenesis, including the NF-kappaB-dependent transcription. Fuller-Pace (2006) Nucleic Acids Res. 34: 4206-1215. The reduced activity of such a generic activator in cumulus cells surrounding aneuploid oocytes suggests that many cellular pathways are probably dysfunctional; consequently the cumulus cells may be unable to perform their supportive roles effectively.

[0279] The presence of aneuploidy in the enclosed oocyte had an effect on several metabolic, intracellular and membrane transport processes in the corresponding cumulus cells. Specifically, both the microarray and the TLDA analysis demonstrated that the B3GALNT2 gene was down-regulated in the cumulus cells of aneuploid oocytes. This particular gene is a glycosyltransferase, which is found in the ovary and is involved in the regulation of protein metabolism. Hiruma, et al. (2004) J. Biol. Chem 279: 14087-14095. Again, this indicates that synthetic processes are, in general, down-regulated in cumulus cells associated with abnormal oocytes.

[0280] Additionally, genes involved in pathways related to hypoxia and apoptosis were abnormally expressed providing evidence for a link between follicular microenvironment, specifically levels of oxygenation, and aneuploidy. Examples include SEPTIN 11 and SPSB2. SEPTIN 11 belongs to the GTPase super-class of P-loop NTPases and interacts with various proteins involved in apoptosis. Nakahira, et al. (2010) PLoS One 5: e13799. SPSB2, on the other hand, belongs to the SOCS box family of E3 ubiquitin ligases and functions as an adaptor protein in the E3 ubiquitin ligase complex that ubiquitinates the inducible form of nitric oxide synthase (iNOS), targeting it for proteosomal degradation. Kuang, et al. (2010) J. Cell Biol. 190: 129-141. In cumulus cells associated with aneuploid oocytes, the reduced levels of mRNA transcripts of these two genes involved in ubiquitination and apoptosis may result in the accumulation of excessive levels of abnormal/redundant proteins or the formation of reactive oxygen species, i.e. from raised levels of nitric oxide due to over-activity of iNOS, but also in the reduced apoptotic capability of these defective cumulus cells.

[0281] Of the 94 genes the expression of which was further validated with the use of TLDAs, 14 genes identified showed consistent, highly significant, differences in expression (e.g., B3GALNT2, C22orf29, CCL16, DCBLD1, DCC1, DHX9, OTUD5, RBBP6, SEPT11, SLC25A36, SPSB2, TACSTD2, Unassigned, and TP53I3). The SPSB2 and TP53I3 genes are of particular interest. A blinded study of these genes showed that they display differential expression associated with the ability of the corresponding oocyte to produce, after fertilization, a healthy live birth. Although aneuploidy may well be the single most important determinant of oocyte competence, responsible for many cases of implantation failure or miscarriage, there are other factors that also contribute to oocyte potential. Consequently it is expected that some oocytes that are chromosomal)/normal will nonetheless fail to produce a viable pregnancy. Given this confounding effect, the fact that an apparent difference in SPSB2 and TP53i3 expression related to live birth was seen is striking.

[0282] In conclusion, there is strong evidence from independent microarray and real-time PCR studies that the subset of the genes reported here can be used for a non-invasive assessment of oocyte aneuploidy. Furthermore, an additional, blinded, analysis suggests that data obtained using this approach could be predictive of live birth. This strategy may allow a reduction in, or elimination of, polar body and/or blastomere biopsy for the assessment of aneuploidy. Given that analysis of CCs can be completed within 4 hours, it should be possible to reveal abnormal oocytes before fertilization, restricting fertilization to those oocytes found to be chromosomally normal, reducing ethical concerns over embryo/oocyte screening. Alternatively analysis could be completed after fertilization. Analyses using this approach would cost a small fraction of alternative invasive (e.g., aCGH) methods and carry no risk to the oocyte or embryo.

[0283] The data provided herein shed light on pathways with atypical activity in CCs associated with abnormal oocytes. Without being bound to a particular theory, it is not yet clear whether these changes are induced by the abnormal oocyte itself or are a consequence of a poor follicular microenvironment, which is also responsible for predisposing the oocyte to chromosome malsegregation. However, the identification of these genes and pathways offers the possibility of finally understanding the genesis of female meiotic aneuploidy and perhaps even providing targets for interventions, either in vivo or during in vitro oocyte maturation, aimed at lessening the risk of aneuploidy occurring.

[0284] Although the invention has been described in some detail by way of illustration and example for purposes of clarity of understanding, it will be obvious that certain changes and modifications will practiced within the scope of the appended claims. Modifications of the above-described modes for carrying out the invention that are obvious to persons of skill in medicine, pharmacology, microbiology, and/or related fields are intended to be within the scope of the following claims.

[0285] All publications (e.g., Non-Patent Literature), patent application publications, and patent applications mentioned in this specification are indicative of the level of skill of those skilled in the art to which this invention pertains. All such publications (e.g., Non-Patent Literature), patent application publications, and patent applications are herein incorporated by reference to the same extent as if each individual publication, patent, patent application publication, or patent application is specifically and individually indicated to be incorporated by reference.

The application's sequence listing, which the Patent Office published only in electronic form, follows.

SEQUENCE LISTING (390 sequences)

SEQ ID NO: 1 - DNA, 4689 bp, Homo sapiens
ccgcagttcttgagttccacatgcagagcagatgcgacagctagaagtgagtagggcccagaccctggcccaggaagatccactaaaggaggccatccttccgccttcttctgcaggagtcaggatggaaaggcagatgtaaagtccctcatggcgaaatataacacggggggcaacccgacagaggatgtctcagtcaatagccgacccttcagagtcacagggccaaactcatcttcaggaatacaagcaagaaagaacttattcaacaaccaaggaaatgccagccctcctgcaggacccagcaatgtacctaagtttgggtccccaaagccacctgtggcagtcaaaccttcttctgaggaaaagcctgacaaggaacccaagcccccgtttctaaagcccactggagcaggccaaagattcggaacaccagccagcttgaccaccagagaccccgaggcgaaagtgggatttctgaaacctgtaggccccaagcccatcaacttgcccaaagaagattccaaacctacatttccctggcctcctggaaacaagccatctcttcacagtgtaaaccaagaccatgacttaaagccactaggcccgaaatctgggcctactcctccaacctcagaaaatgaacagaagcaagcgtttcccaaattgactggggttaaagggaaatttatgtcagcatcacaagatcttgaacccaagcccctcttccccaaacccgcctttggccagaagccgcccctaagtaccgagaactcccatgaagacgaaagccccatgaagaatgtgtcttcatcaaaagggtccccagctcccctgggagtcaggtccaaaagcggccctttaaaaccagcaagggaagactcagaaaataaagaccatgcaggggagatttcaagtttgccctttcctggagtggttttgaaacctgctgcgagcaggggaggcccaggtctctccaaaaatggtgaagaaaaaaaggaagataggaagatagatgctgctaagaacaccttccagagcaaaataaatcaggaagagttggcctcagggactcctcctgccaggttccctaaggccccttctaagctgacagtgggggggccatggggccaaagtcaggaaaaggaaaagggagacaagaattcagccaccccgaaacagaagccattgcctcccttgtttaccttgggtccacctccaccaaaacccaacagaccaccaaatgttgacctgacgaaattccacaaaacctcttctggaaacagtactagcaaaggccagacgtcttactcaacaacttccctgccaccacctccaccatcccatccggccagccaaccaccattgccagcatctcacccatcacaaccaccagtcccaagcctacctcccagaaacattaaacctccgtttgacctaaaaagccctgtcaatgaagacaatcaagatggtgtcacgcactctgatgtagttattcctctggaccatgaacaagacagtgaaggagaaacatatgaagacatagaagcatccaaagaaagagagaagaaaagggaaaaggaagaaaagaagaggttagagctggagaaaaaggaacagaaagagaaagaaaagaaagaacaagaaataaagaagaaatttaaactaacaggccctattcaagtcatccatcttgcaaaagcttgttgtgatgtcaaaggaggaaagaatgaactgagcttcaagcaaggagagcaaattgaaatcatccgcatcacagacaacccagaaggaaaatggttgggcagaacagcaaggggttcatatggctatattaaaacaactgctgtagagattgactatgattctttgaaactgaaaaaagactctcttggtgccccttcaagacctattgaagatgaccaagaagtatatgatgatgttgcagagcaggatgatattagcagccacagtcagagtggaagtggagggatattccctccaccaccagatgatgacatttatgatgggattgaagaggaagatgctgatgatggtttccctgctcctcctaaacaattggacatgggagatgaagtttacgatgatgtggatacctctgatttccctgtttcatcagcagagatgagtcaaggaactaatgttggaaaagctaagacagaagaaaaggaccttaagaagctaaaaaagcaggaaaaagaagaaaaagacttcaggaaaaaatttaaatatgatggtgaaattagagtcctatattcaactaaagttacaacttccataacttctaaaaagtggggaaccagagatctacaggtaaaacctggtgaatctctagaagttatacaaaccacagatgacacaaaagttctctgcagaaatgaagaagggaaatatggttatgtccttcggagttacctagcggacaatgatggagagatctatgatgatattgctgatggctgcatctatgacaatgactagcactcaactttggtcattctgctgtgttcattaggtgccaatgtgaagtctggattttaattggcatgttattgggtatcaagaaaattaatgcacaaaaccacttattatcatttgttatgaaatcccaattatctttacaaagtgtttaaagtttgaacatagaaaataatctctctgcttaattgttaactcagaagactacattagtgagatgtaagaattattaaatattccatttccgctttggctacaattatgaagaagttgaaggtacttcttttagaccaccagtaaataatcctccttcaaaaaataaaaataaaagaaaaaggaaaatcattcaggaagaaatgacctgtctaaaaaaacctaaggaagaataataatataagaaaggaaatttaaaaacattccacaagaagaaaaattattgtttatacttctacttatggttatatcttatattctctattcaagtgacctgtcttttaaaaaggcagtgctgtcttacctcttgctagtgggttaaatgttttcaaaaattatagcagtagtagaagttttgtataaaatttgtccttatttgttaattgtatataaatgttaattatttgatacgaatgttatgcatttagtatgcacattgaagtctaaactgtagaagagtctaaaacaagttctctttttgcagattcacatactaatggtttaattctgtgctctgtttaaagtactattataactagagtagatctgaatgaggataaccctaaaatcatgaggaatggaagaatggaccttgaaactacctaggcttttatgcatggcacctctttataatgaagacactttttaaagtttttgtttttgtttcaattaccgctagatttttttttctctttttttaaaatccattttactggaaagttggccagcagagggagtagaaattattaaaattctagtgtttggattgggcccttctctaacagtacatactcattcccaaagcaatccaaaaacaaaatgtgaaccatttgggtttcaaatgttaagaacactaaatagcatgatttaaaaaatgaaaaatgctaacacccaagaaaagaagatattaagtgctttttaacaactcctagagtacaaaatgagtacatcataatgctggctcttctactaatgaaccatcgagtgatattgaataaattatttatcttctcagtttccttatctgtaaattacaatattagactaagtaagtttttccaactcttcactaccaattaccttaggcttttataatgctccgcctacttcagtcccatgtttcagaagcttttgtctattttttaaactcattgattaaataatgattaatgcattctccacattttaatattgcaaaggcccattggagtttctgaagtggctccacagaattgaaataatttcaaataactgtaaaggaactgaaaatcttcacagagatgaagtggggtttccattaggtgctttgaaatttgataacaaatcatcaacttccactggtcaatatatagattttgggtgtctgaggccccaagattagatgccactaatctccaaagattccctccaattatgaaatattttaatgtctacttttagagagcactagccagtatatgaccatgtgattaatttcttttcacactagataaaattacctggttcaaaagtggtttttgtttattaaatttggtaataaatatatataatacacagacaggatagtttttatgctgaagtttttggccagctttagtttgaggactccttgataagcttgctaaactttcagagtgccctgagacacttccagccatccctcctcctgccttcattggggcagacttgcattgcagtctgacagtaattttttttctgattgagaattatgtaaattcagtacaatgtcagtttttaaaagtcaaagttagatcaagagaatatttcagagttttggtttacacatcaagaaacagacacacatacctaggaaagatttacacaatagataatcatcttaatgtgaaagatatttgaagtattaattttaatatattaaatatgatttctgttatagtcttctgtatggaattttgtcacttaagatgagctgcaaataaataataccttcaatgg

SEQ ID NO: 2 - DNA, 2699 bp, Homo sapiens
aagcccctccccttctctgggccttgatttcccctcctgctcagtggggacgttcttggtcctccttcttgcccactctacccagtcgccgagtctggcgaagcagagctgtctgggggtcaccgcagcaggagggaccgagcttagatacgaaaaaagacttctacacggcaagagccacagaaaggacgctccagctggctcagcagaggggcatctctccctttcaagaacaaaaggtggcaggtacccgggggccctggggcagaacgaggtaaattctgcacggacttccacatctaagaccccagaaatctccagccggctccctccgaccgaatgagaccgtgctgcaccagttctgctgcccagccgccgacgcctgctccgacctggcctcccaaagattgaaatgctagaacataagtacggcggtcacctggtgtcccggcgcgccgcttgcaccatccaaaccgccttccgccaataccagctcagcaagaacttcgagaaaatccgcaactcgcttctggagagccgcctgccacggcggatctccctgcgcaaggtgcggtcacccacggccgagagcctggcggccgagaaagcgctcatggagggctacggcctcgtggggctgccgctggtgcgctcgccctccctgccgcccaccttcgcaggcaccctcaccgagctggaggactccttcaccgagcaggtgcaatccctggccaagtccatcgacgacgcgctcagcacgtggagcctcaagaccatgtgctccctgcgggagagtggcgcttaccagctccaccaggccctgcaggcggccgcggggcccccaggcctggaggccgaggggcgggcgccggagagcgcgggccccgggcccggggatgacgccgcggagacccccggcctgcccccggcccacagcgggaccctcatgatggctttccgggacgtcacggtgcagatcgccaaccagaacatatccgtctcctcctccacggctctgtcggtggccaactgcctgggcgctcagacggtccaggcccccgcagagcccgcggcgggcaaggccgagcagggcgagacctctgggcgggaggccccggaagcccccgccgtgggccgggaggacgcgtcagccgaggactcatgcgcagaggctgcggctagtggggcggcggatggggccacagcccccaaaacagaggaggaagaggaggaggaggagacggcggaggtggggagaggggccgaggccgaggcaggcgacttggagcagctgagcagcagcagcacgtccaccaagtccgccaagtcaggctcggaggcgtcggcctccgcctccaaggacgccctgcaggccatgatcctgagcctgccgcgctaccactgcgagaacccagccagctgcaagtcgcccacgctctccaccgacaccctgcgcaagcggctctaccgcatcggcctcaacctcttcaacataaaccccgacaagggcatccagttcctgatctcacgcggcttcatcccggacacccccatcggtgtggcccatttcctcctccagcgaaagggcctcagccgccagatgattggagagttcctgggcaacagcaagaagcagttcaaccgcgacgtgctggactgcgtggtggacgagatggacttctccagcatggagctggacgaggccctgcgcaagttccaggcacacatccgtgtgcagggggaggctcagaaggtggagcggctcattgaggccttcagccagcgctactgcatgtgcaaccccgaagtggttcagcagttccacaaccccgacaccatcttcatcctcgccttcgccatcatcctcctcaacaccgacatgtacagccccaacatcaagcctgaccggaagatgatgctggaggacttcatccgaaaccttcgaggtgtggacgatggcgctgacatccccagggagctggtggtaggcatctatgagaggatacagcagaaggagctcaagtccaatgaggaccacgtcacgtacgtcaccaaggtggagaagtccattgtgggcatgaagacagtgctgtccgtgccccaccgccgcctggtgtgctgcagccggctcttcgaggtgacggatgtgaacaagctgcagaagcaggcagcgcatcagagggaggtgttcctcttcaatgacctgctggtgattctcaaactttgcccgaagaagaagagctcctccacgtacaccttttgcaagtcagttggcctgctgggcatgcagttccagctctttgagaacgagtattactctcatggcatcacactggtgaccccgctctcgggctccgagaagaagcaggtgctgcatttctgtgccctgggctcggacgagatgcagaagttcgtggaggacctgaaggagtccattgctgaggtgacggagctggagcagatccgaatagagtgggagctggagaagcagcagggaacaaagacactctccttcaagccctgcggagcccagggggacccacagtcaaagcaaggatcgccgacagccaaaagggaagccgcgctcagggagaggccggcggagagcacggtggaggtattaatcaatgcctccccagcccgactcaccattttaccaatttcaagagatacaattaaaagttactgctagcatgggt

SEQ ID NO: 3 - DNA, 630 bp, Homo sapiens
ggggcatccgagcgggtttgacggaaggagcggcggcgacggaggaggaggatggaggcggtggtgttcgtcttctctctcctcgattgttgcgcgctcatcttcctctcggtctacttcataattacattgtctgatttagaatgtgattacattaatgctagatcatgttgctcaaaattaaacaagtgggtaattccagaattgattggccataccattgtcactgtattactgctcatgtcattgcactggttcatcttccttctcaacttacctgttgccacttggaatatatatcgatacattatggtgccgagtggtaacatgggagtgtttgatccaacagaaatacacaatcgagggcagctgaagtcacacatgaaagaagccatgatcaagcttggtttccacttgctctgcttcttcatgtatctttatagtatgatcttagctttgataaatgactgaagctggagaagccgtggttgaagtcagcctacactacagtgcacagttgaggagccagagacttcttaaatcatccttagaaccgtgaccatagcagtatatattttcctcttggaacaaaaaactatttttgctgtatttttaccatataaagtattt

SEQ ID NO: 4 - DNA, 3111 bp, Homo sapiens
acttatagaagcatcccaagcctcagccggtctgcatctccatcggaaagtgcgcttgccacatcccttcggatcacttcgtcctcccgagagcgttctgccttctacagctcggaaagaaagaaatcttagctgtgaagtgaccgtggagaaagcgcaggaagcgacacaattggttagggaggcagagagtgtgagcgggcgcaccccttgcctggggaccgcgctcgcgggcggggacggagcatcccagtggctgcacccgccgctccgcgctcctgcctggcgtcgccaaccccgcggcggccgctggaattccagagctgccaggcgctcccagccggtctcggcaaacttttccccagcccacgtgctaaccaagcggctcgcttcccgagcccgggatggagcaccgcgcctagggaggccgcgccgcccgagacgtgcgcacggttcgtggcggagagatgctgatcgcgctgaactgaccggtgcggcccgggggtgagtggcgagtctccctctgagtcctccccagcagcgcggccggcgccggctctttgggcgaaccctccagttcctagactttgagaggcgtctctcccccgcccgaccgcccagatgcagtttcgccttttctcctttgccctcatcattctgaactgcatggattacagccactgccaaggcaaccgatggagacgcagtaagcgagctagttatgtatcaaatcccatttgcaagggttgtttgtcttgttcaaaggacaatgggtgtagccgatgtcaacagaagttgttcttcttccttcgaagagaagggatgcgccagtatggagagtgcctgcattcctgcccatccgggtactatggacaccgagccccagatatgaacagatgtgcaagatgcagaatagaaaactgtgattcttgctttagcaaagacttttgtaccaagtgcaaagtaggcttttatttgcatagaggccgttgctttgatgaatgtccagatggttttgcaccattagaagaaaccatggaatgtgtggaaggatgtgaagttggtcattggagcgaatggggaacttgtagcagaaataatcgcacatgtggatttaaatggggtctggaaaccagaacacggcaaattgttaaaaagccagtgaaagacacaatactgtgtccaaccattgctgaatccaggagatgcaagatgacaatgaggcattgtccaggagggaagagaacaccaaaggcgaaggagaagaggaacaagaaaaagaaaaggaagctgatagaaagggcccaggagcaacacagcgtcttcctagctacagacagagctaaccaataaaacaagagatccggtagatttttaggggtttttgtttttgcaaatgtgcacaaagctactctccactcctgcacactggtgtgcagcctttgtgctgctctgcccagtatctgttcccagtaacatggtgaaaggaagcaccaccagcatggcccctgtgttatttatgctttgatttgaatctggagactgtgaaggcaggagtaagtgcacagcccgtgacttggctcagtgtgtgctgagagaatccgtccccggcaccatggacatgctagaggtgtgaggctgcagaacaccgctggaggacggacttgtgcctatttatgtgaaagaagatgcttggcaggcaatgcgctactcactcgtgacctttatttctcacattgtgcattttcaaggatatgtttgtgtggatatctgcttagtgttaccacatggtattctcagcatgttaccttcacactgttgtgcgatgaaactgcttttagctgaggatatgctctggaaattcctgctcagtttcactgcagccctaatatgtacatatactgcaggagctacatataaagctcttatttactgtatatttatgctttcttgtgggtaacaagtcatacctgattaatatgatgccactttgtttctagtggttcctaacccattgtctgataaatgacttttctagtttggggaattgacacttgttttgttgcctcttgaaactttttttttttcccctcattgtgggcttatttctcattgtaagggtaggataaactagtttttgtatatagagtcaaatgaccagtgtcaaagagtttgcatattgggtagaccttctccactccacatgtcccacacatatagataaagcagcaggcggcatctggcaatcagaagcccaaactgcctttgagtctaagatgtgatgactttgatgaaacacaactgaaaacatgagggactatatccagtcacttgtagccagtttcacaggccagctacagaattgtccaaacaaacattatttctgactgcaatttttttcccccaaatttaaagcaatccctggctttaaatgacaaggcacctaccaatgttcttgggtcactgaagaagctactaccatgagcctgggcatagaattttaggagataaaaggatgaatttctgtgactgccagtcagatcttaacaggtttctgttgagccagaatctgtttcagatccaagatggagaggaacactatggaaacttcccaggtgactttcagagcagttgtttcaaacacatcattgtccttttaggggaaccagtttttagaaggttgtgaattggctttttcacaaagcatgattatcttcctggctgatccaggagaaaattagaacagaaaaataatggttgtggattttgaaacaaagcaaggtaaagccttttttttttcaccttgcattggcaaaactacctcttcagtgtttttaacttttgattcaaaagcatcttaccaataaggataaatatcatatacatcgttatgaaaatattgctatgagataataagccacatatgaatgttgtatacaactttagggtttacatttaatcctgaagtgttacctcctttcatgtctatttacactattttcccatttactaagtggggagggggtctccttatatagtgcttcatcgttaataagtcaatacctgttgttcctgggatgttcttttttgtgcattaaaaacttcaaaatt

SEQ ID NO: 5 - DNA, 4424 bp, Homo sapiens
cccgcctcccagtagccgcgcctcaccctaggccaggaatggttttagggaagactgttgccggatgacaaggctgtcactattgttctgtactacctgacattatgggaccaggccagccagcttcaacctgtgttcatctagcacctaggacccaacttgatgggaggagcgaccccaaagtacttcagacccagaaccagctgcagtttaataggaatgttcctacacattcaagcaacttggcgatccgatattcttgcccacatgccattagaattgaaaaactgaagcactcatacaatgaatcataccattgtaaagatgcagattgtagagttggtcctgacctgggcagttctgtttcattttccgtcatatcccaagagagacttagctatgctgtccacctagccagaagagatgtgaaacgaagacaatttgaaaaacatataaaagaacatcatctcagaagtcagcctcaaagctctcagaagtgtggacatactaagtataaaatacccgaccacagggtggaaaggaaggaatcaaagagtcaagcagcctgtcagtgtagccaccagccatccaaagtagaaatctccagctctggtgccaaagtatacctttactcatctcatccaggccagtcagatcttactgtgccaaattcgccacccacccatgatccgggacttcagcctcatcccaggataggtgaccacaaaaacataagtgaacagaaaagcctgctagaagtccagcgactccagaaagaactgagcagttgtatccacaaaattgaagaggtaactaaaaaagatagactagaagaagctttggatccagatgaagaacgtcgaatccgtatcaggagacaggagcaagctgctcgctctgcccgaatgctctacgtcctccagcagcaggtaaaagaaatccaggaagaattggataaattgagtccacataaaattaaacacactaagaagtcatgggcaatgtctaagctggcggctgcccatcgaggagccattcgggccttacagatgtttgtcactcagtttactgaccgaggggagcatccacttcctgctcggtgtaaggaactgggcagccttattcgccagctttcactttgttctgtcaagctggatgcagacccttctgttcctgatgtggttatagatattctgcaacaaattgaggctttggaatctctcctggaaaagaaactgtcaccaaaaaaggtgaaaaaatgtttcagtgaaattcggagcagatttcctatcggtagccaaaaggccttggagagatggccaagtacatcaccaaagggtgagaggaggcccctcacagcaaaggacacattcccacaggaaacaagtcgaccttctgtagcaaagcagcttcttgccgataagtatcagcccgatacggagcttccggagacccagaggttgcagagtgagcttgatgtattagatgcggatatagttctggaagaaggaccatttattctagaccaaagtgcaagcttcaaagacgaggtgttagccgtggcaaaaacaaaagcagggaaaaagaagcctgtgactgagaatgtgccgtttaggaagaaagatactctggcgccagcaagacagcaaggactccgcaaagctgaaagaggtagacaaagccaacctcacagtaaaagcagagtgcagcagacaacagtttcatccagattaaaaatgaaccggcagcctgtgaaagaccgcaaggcaccatggatacccccaaaccccacatccccaccagcgtctcctaaatgtgctgcatggctaaaggtgaaaactagccccagagatgccacaaaagagcctctccagcaagaagatcctcaagaggaaagtcacctgacaggtgctgttgagcatgaagcagccaggctcgcttggcttgatgctgaaacttccaaaagattgaaggaactagaagagttaaaagccaaggaaattgacagcatgcaaaaacagaggcttgattggcttgatgctgaaacttctagaagaacaaaggaactgaatgagctcaaagctgaagaaatgtatagactccaacaattgagtgtttctgccacccacttagcagacaaggtagaggaggcagttctggatcgtttgaagcctctcttggtcaaggcccagagagtcaattctactacagaagcaaatattcatttgaaagatggctcgtcagtaaacacagcgaaagcccagcctgcacaggaggttgcagctgttgattttgaatccaacaacattcgtcagcttgatgattttttggaagattgtgccagtgagctctgggctgtgactcatgctaagatcttggggtctgaaaccttagccaccgttgaggacagcaaggatagcccagatctggagatcatgatgcgccgaatggaagagatggaaaaataccaggagtctgttcgtcaaagatataataaaatcgcatatgctgatcctcgactttggatgcaggaagaaaacaatgaccaaaaaatctcagcaataagtgaaaagcctctatctcctcatccaatcagaatcacgaagacagtggatcgcaaggatccagccgtgaacatcatgttagaaaggccctgtaatggcaattccctggatgaaagtgtgggaacagaggaaggatcagagaaaagagaggcccctcttctctccctagccgaagattctcaacagaaagaaggccgagctcccctctttgtcccaccgggtatgcagcacagcatcggtgactactgtagtcgttttgagcagtaccttcggatcatatctcatgaggctgtaggctccttcaacccgtggctgatagctgaaagcttttcagaagagctggtagatgaagctctgggtgctgtggctgctgaacttcaggatatgtgcgaagattatgcagaagctgtgttcacctcagaattcttagaggctgctacataaaggctctctgaggcgaggccatttgtgtcacactggagaagggatggcaccaccctttgttttggcccacaggaaattttcatcctcagctgtccatccaggcccagaaggtgctgcccactgaaaggaaggcagtgccggggaggtcatcctcactttgcattttcttttgtcatggcaatggttctggaaatgtatgatgcaatgtatcacacttatcagtgcccaggcaacacaacttgattatggcaatattttcagaatgtgtacttttcctattgaaataccatgttcattcctctggctcagtttggtgatgaaaatgttttgaaagataatcgatacgtatatttcacacaaggattcaggttgctgttgaacccttgctggcattgataccaacacaagtgcggctactagctggtcccatcacggggcccctgttttgcatctttggcgatttcctgtcaggacctctggccctactaggctgtagactcagggagagcacagtctggctgtgctgccaaacctctcctctgctgcagtttattccaaacaggagccccctggctgtcagtgcacaataatagacacacatttcttcaacgttccattcctaggtgattttcacatttttagttcctcagcatattttattgctgtgtgttgacacaatctggtataaaaaactttctctggattcagaggaagtttgaggaatcaggagaggaccaggccttctcctgtgcctgggtgaaggtacagacctcgctgtgtctccgatgaggtcagaagtgtctctatttcataccacaaaggaacccaagtgggagtagggaacagatggatggcgcgaagacctctgtgtctccccagagaaaggaagaaacttaagaaccatcatagcctggtcctccaacatcttacagatcatgttttccaagagaaaagcctgtgttttcagaaactctgaattcagaaaaagaaacggaatgtgcgtaagaatcaggccactgcctggaaagactttctctcaattcgtagcctgaggctcagtgaaggaaacatgcagaaagaatgcctgagacgcccccagggaataagggaactctttataacctgtccagtgccgtcatctgggatttttctctgaagtacaagaatttcaggtgatttaagctgcttgatcacacttatttgtgcaaaattgattttcatttaatgttaatgttttcctgcttaattttatataacttcagaatgtaaagagcttcaaggtaaattacagggtgtttaacctggggagttaaatgtgtacacttgaattaataggagcaccggttgttgctagtataaagtaatttgtgtggcagtttgtactgtgctgagtttttaaaataaacccaatatttt

SEQ ID NO: 6 - DNA, 4630 bp, Homo sapiens
ggagcccgtgcgcggcccgggcagccgcgctttcccaaaaaacacaccttgactttagtcagatacatcactgtctgttaaaggaaaccaagcgtgaagtggaagtctaacacatgaggatacagaattgattcaaaatgggaacaacaagtgatgagatggtgtctgtggaacagacctcctcctcttctctaaaccccctgtgttttgaatgtggccaacagcactggacaagagaaaaccatttgtacaattaccagaatgaagtggatgatgacctagtctgccatatttgccttcaacctctgctgcagccactagacacaccctgtggacatacattctgctacaagtgcctcagaaactttttacaagagaaagatttctgtccgttggaccggaaaagacttcattttaagttgtgcaagaagtctagtattctagttcataaactcctagacaaattattagttttatgtccattttcttcagtgtgcaaagatgtaatgcaacgttgtgatctggaggcacatctcaaaaacagatgtcctggagcttctcatcggagagttgccctggagagaaggaaaactagtagaactcaagcagagattgagaatgaaaatgggcccactctactagatcctgcaggtaccttatctccagaagcagactgtttggggacaggcgcagtgcctgtggagcggcacttgacatcagcgtctctttccacatggagtgaggagcctggccttgacaaccctgcctttgaggagagcgctggagctgacaccacacaacagccacttagtttaccagaaggagaaatcaccacgattgaaattcatcggtccaatccttacattcagttaggaatcagcattgtgggtggcaacgaaacacctttgattaacattgtcatccaggaggtctatcgggatggggtcattgccagagacgggagacttcttgctggagaccagattcttcaggtcaacaactacaatatcagcaatgtgtcccataactatgcccgagctgtcctttcccagccctgcaacacactgcatcttactgtgcttcgagagaggcgctttggcaaccgagcacacaaccattctgatagtaactctccacgagaagagattttccaagtggctcttcataaacgggactctggtgaacagcttggcattaaattggtgcgaaggacagatgagccaggggtttttattcttgacctgttggaaggggggttggctgcccaggacggcaggctaagcagcaatgaccgagtgctggccatcaatgggcacgacctgaagtatggaactccggagcttgctgcccagattattcaggccagtggagagagagtgaatttaacaattgctagaccagggaaaccccagcctggtaacaccattagagaagcaggaaatcatagcagcagcagccagcaccacacaccaccaccgtattatagcagaccaagctcacataaggatcttactcagtgtgttacatgccaagaaaaacacattactgtaaagaaggaaccacatgaatcccttggcatgaccgttgctgggggcaggggaagtaagagtggtgagctgcccatctttgtgaccagtgtgccaccccatggctgccttgcacgagatggcagaataaagagaggtgatgtgttgctaaatatcaacggcattgatttgaccaatttaagtcacagtgaggcagttgcaatgctgaaagccagtgccgcgtcccctgctgttgcccttaaagcacttgaggtccagattgttgaggaggcgactcagaacgcggaggagcagccgagtactttcagcgaaaatgagtatgatgccagttggtccccatcatgggtcatgtggcttgggcttcccagcacacttcatagctgccacgatatagttttacgaagaagttacttgggaagttggggctttagtatcgttggtggatatgaagagaaccacaccaatcagccttttttcattaaaactattgtcttgggaactcctgcttattatgatggaagattaaagtgtggtgacatgattgtggccgtaaatgggctgtcaaccgtgggcatgagccactctgcactagttcccatgttgaaggagcagaggaacaaagtcactctgaccgttatttgttggcctggcagccttgtatagattttggaaattggtttcaaatcttgcatcttccttttttagatttttgaaagaaaaccctttggtttcattgtgtttgtggtttaggagctgctgacactgctggtatacacagggccaaaacccactaagattgtccgtttatgtttatttaaatggtttcctaagttagttacatttcttttagcttggaaacagtcttccactaacctttgtgagtttatattttcagaattcagacttagttgttaaaatgttacctatggtaatgagcaaagctcacccaaactgtgccccagatggagtaaagaccttctggtgggtctttgttttcagtaactgaatcatagaacgagttctgtatccctcaggcctgatgtcagcaaagccagtaacaacagcgtgtactgccactgtcataaccaataccatgaatgaatatactttaaattttggtgataactgttccccatttttttttgaaccacagtctcactctcacccaggctggagtgcagtggcacaatctcagctcactgcaagctccgcctcctgggttcacgccattctcccacctcagcctcccgagtagctgggactacaggcgtgtgccaccatgcccagctaattttttgtacttttagtagagacggggtttcaccgtgttagccaggatggtctcgatctcctgaccttgtgatctgcccgcctcagcctcccaaagtgctgggattacaggtgtgagctgccgcacccggccgttcccattttttattggtgccaacatttcaaaacttcatactgtttataaactgattttctggtttatttctactgtaatctctcaatattcatagaagatgaagaaataagtctgacaacactaaagaaatttcttaatatactattattagaatagtagaggataaaagataatgttatccagttacaaaggaatttggatgataattataacttaatgttagagatggtaaagctgcacttacttgaacagcccaaaagcattaaaaatctatttccagaggaatgttttgctatgtagggaaattttgaagtagtttttgctaaaaaattatttctagagttgtgttattcttagcagtaatcttggctagaaatgtttttgtgatttatgcgattaaacgaaatgataaagataaaaccatattattaaatacctatatatcacagctaagtaggagaaagggagacctttttattttgttcaggtaggagtatttcttgtgtattttagaaacaattatttttcccattatttcttatgagattagttgtttcaagtaggagacagaaaagttctgttttgttggaaatgtaggttttagatgtatctttcagtcagctctcagtcactagactatttcatattttttgaaatgtttttgaaaattatgactagcccattttttgtcctttattcaacatacttatcctctgaacacataaataagtgaataagataaaaatatctttaccttattaatattatacatacttgaaaaaaatttcatttagaaacctagttcagaatctgagcaaatttacaagtgacctctgtaataaatggtattgataatcagagaatgtatttcagaatactacagtacaatatattatgaagcatgaccactttattttgaaacttagcaattgtattgctggggtttattgtatctgtagcatgtcactgattatttcagttagttttataatgatttttaaaaaacatatctatttggaataagatacagcaacaatcattgctactgacttgttcaaccccttagttacactgtatgatcaacatataacaagatacagtggaatggcccatacagtatattactgttgtgtgatgattggctttggaagcagtttgattttgaaatgctttgatattctaattgacatggaacaagttttttccctgctccccaaatagaattttgtaaccaactttgctatttttttaaagtttgtaagaatgtgtcatttcttggggagtagccatccatcaacaaatatcctgactgctactttgttatatacaaaatacttacattgaacctggtggcataatgagtattttgaaagaagaaatttcttcactctcatttttatagaaatcttggaatcagcttaagctgtagcttttatgacaaaagacagtcatttttggtcagagtgatatttggtgacggaaacttgttcataatttattgttactatagaactatttggattttctcatttttagttctgatagttaaatattttggtttgttctgtgccttcagtttaaattatttcaggatttttcagatgtttaaataatggtgtgaatcattcaggatggaaataaaagtcatcctttctgt

SEQ ID NO: 7 - DNA, 4410 bp, Homo sapiens
cattaggaatcagtggtattgttatagtctaccaggaccgacctggtgctgctcagaaccaggggctcaaggcagggcctcccttcatcttcttaaattattctctagcagctctgagtctcccaaagattggtcctagagaaaagactatgtcatttactgctttttctgatggtaaaaacatgcatatttactgcagaaaatttgaaaaatagagaaatgtgtaaagaagaaaacgtacaaaataactttagactcaaaaccaatctgattaaatcaggaaatcattatttattgagcacctactatgtgccagccactgttgttcttggtgctggggacatagcagtgaaaaaaaaacaaagtcctccccttcgtggagcctatatttcagtagggacagtcagtacagtacaggaaggggctgggctgatggaacaggatgccttttttgatagggtggtcaggacaagaggaagcaagggatgcagctatttggggaagagtgtttccagcagaaggaagaagacctgcccaggtgtcggataagagcctgcttggtgcattcagggatacgaaggaggccagcgtggctgagatgaggtaggggcagccggggtgagaacaggtgggacttgccggccatgaagaggaccttggattgctgttgagtgaaatggaaagccaaatgtagggtcttgaacagaagagggacatgatgagccttatgttttgaaatgatcattctggacaccagatggaaaatagacaggggctgggggtggggttggcaaggggagaagcttggaagccatttggttattgcgaaagtcacacaaagctgtgaaagcagagctggcctggttgaaggaagggtggaggtggggggagggccggcatttcctcccactgagcctctgcccttcccttttcctgctctctgaggttccaccatgggaccccagggtacctaggattacaatttgaaagctattggactagaggttctctaagggcccttccagctttgcctcctgtgctcttgtgtttcaggaccatgctgattctgtgggaccaggcccgggctctaccagccaggcctctgaacatgtcaacttgagaactgaacaggttcagggtctaggaaggggagacatttcaaaattttaattaaaaaatatttttaacgtttaaatttttgtagagacggggtcttcccatgttgcccaggctggtctcaaatttctgggctcgggtgatcctcccgccttggcctcccaaaatattgggattacagacatgagccatgagatttggaaacttaattcagctcccacatactaaacgtggccagccctgtgtggggattgtaagaggggataagtaagaggaaatgtctgctccaagaaactcactggctgggatgggaactagggaatcacacaaatggcccagcccaaagtctgagaggccccggcccctccctgcctggccttttttccatgtggcccctgagccagtggttcccaaactgggcaggtcatggggtcatcgaggaacttcagaatatgcagatgcccagactgtgccctcaaagattcaaattcagttagtcgagggtgggtggggcctgggaatctgttcagacaaaggcctggcctgaagcctgggctggagggttcagtccagacagaagaacagagactgatgagagggcttctgccagcttcaccaagcccgtgctaggcaggatgtggaaatcaagcctgtcttccagtggggcacgggggtggggagctggaggagggggtggcagctcctttatcagctgtccccatcagaggcccttctcccaggaaggaatgtttaaaaaactcccaggaaggaattgctgggtttggagactatgagaattccccatctcccccaatctcctcagccacctcaaatcaaccagcccgtctccccatgtttgggttaactccttattggctcggaatgtctcgcctgggttgactactgatctgtgagatcgcttagtggcctgaaatatttccagaatacaagcaacactgacaaaaatattcttgtagggccccacaaatctcactgagaaagaacccctacaggtggagaggagtgtggggtatgcagactggaaggtgggaccctgattcattccagaactggaaggaaatcagacatttccaaacaggagagagatgggaagccggaggaaggagcaggaggagggaagagaatgaatcttatgtgaatgaatggtaattttctctcagttactgggaagaaaaaaaaataacaaaatcagaccttggtctggtccactaaaaagaattctctgagtcagacttctttcatggaagttgtgaactttatcctctggcagccatttatctaatattaaaccccttaaccttcctaattgttctctttcagtatcagctggtttcatattaacctttcagtctttcccataatgcagttacctccaactcccgccagacccaattcagagctgccatcaggtcagacctttgcctgctcttggcaacacgtccccctgtcctgctcctctgcaacctgcccctctttttcttcatgtgctgtgaaggcaccatgtggatgggtgttcaacttctggattggggatgcacagagcctgagggacacactttgcaaacctgcaccttgcacttttgggttctggcctgcaaggtctcctttattcttttggaccaaggctgtccctgggagagggcagccgccggcctgtcagagcaaatcagcctcaggcggtttctgcggctctggtatttgagctttgttttccctctctcccgggaagaactcattgaaatagtttctctgggaaagacaaagcgtctcgcccagatgctgaaggatcacttggtaactgcctgtcttggtttcccgttgtgcccatgaaggcgccatcagctctaaagctgacctgtggttccgtctccaaacagctaacccagacgtcacccccttgcagccagccgcacagcctgagttggagttctggcctctcctagcagtgagtgacagtgttggaggggccttggacaccttgggtaattgctaactaaatatgagcagtaggggaaggtcttctggtccacggcagagccaacggggcacttcctcttctcttttctagtcagggtagaaagctagaaagaatcctaaaaatcactatccaagtccccattgtgtggggacagaggcctggcctgaagcctaggctggagggttcagtcggaagcagaagccgggagactgcatgagagggttccttccagcttcaccaagcccgtgctgcgcgggatgaagaaagtcaagcctgtcttccagtggggccctgaggtgggggagctggaggatagggtggcagcttttttatcagctgtccccaaaagaggcccttctcccagttgccacggaccaaagctcctcctgggagctccagcctgtctgttcaatgtttgccttgcgccttttcctggtgaggccacccccggcaccatctcaggcctcagaaggacgacctcactgaaacagcccttaggttgggaaagaagcaagccctccgcgccccgtccaagtctctcaactgggcacgagcacacacagacgcccaggccctgtccctgcgccagaatggccgctcgcgtttccaggcacgatgcccctttccatgagtgcacagagccctgggctgagctgggggccgagctccacgctctctgagcagctctgagcggcacgccaaagaaggtctttcagatgggctctgggatgtggaaccatggcgtccagccctagcgtcgactccacactagaggcaccctgactttcgcccccttcttacctgagtatcagcttacttccatctggggactgaatatggggcagattccagaaaaaggaggttggggcaccaaaaccaacaccaactctgccaacggagccagcacagctatttgtctccaaccacaggccgcaagggaagttcacgggctcggcacccccaggtcccggatgtaaggatattgcccgttagacaaaggaaaggccccaagtccacaactcatgtttgtgagcttaaccttgtcctataaagcactttggaacaggcccaggttctcccaccatgtacagctgccattgacctggacagtcccgcaaggtccttcagtggaaacccagaagggagagtcactgcatgtgaaccctaagggttctggaggtcaaagttgctgtgggtgacaggcaaccaagactaagggcaaacttgaaacataaatgagttaaaacccacaaaaataagacagttttaaataactaaaaaaaaaaaaaaaaaaa

SEQ ID NO: 8 - DNA, 1256 bp, Homo sapiens
attcctgcgctggaggccgcctctgacgccaccggctgggctccgccatgagttcggcgccggcctcaggctccgtgcgcgcgcgctatcttgtgtacttccagtacgtgggcaccgactttaacggggtcgcggccgtcaggggcactcagcgcgccgtcggggtccagaactacctggaggaggccgccgagcggctgaattccgtggagccggtcaggttcaccatctccagccgcacggacgccggggtccacgccctgagcaacgcggcgcacctggacgtccagcgccgctcaggccggccgcccttcccgcccgaggtcctggccgaggccctcaacacacacctgcggcacccggccatcagggtcctgcgggccttccgagtgcccagcgacttccacgctcgtcacgcagccacgtcccggacctacctgtaccgcctggccactggctgtcaccggcgtgatgagctgccggtgtttgaacgcaacctatgctggactctcccggcagactgcctggatatggtcgccatgcaggaagccgcccagcacctcctcggcacacacgacttcagcgccttccagtccgctggcagcccggtgccgagccccgtgcgaacgctgcgccgggtctccgtttccccaggccaagccagccccttggtcacccccgaggagagcaggaagctgcggttctggaacctggagtttgagagccagtctttcctgtatagacaggtacggaggatgacggctgtgctggtggccgtggggctgggggctttggcacctgcccaggtgaagacgattctggagagccaagatcccctgggcaagcaccagacacgtgtagccccagcccacggcttattcctcaagtcagtgctgtacgggaacctcggtgctgcctcctgcaccctgcaggggccacagttcgggagccacggatgaccctggacactcaagccaaagttaggccacaccaggcccaaccctgtgctggtcaagccagggcagtcacagctgcttggggcccacagcactgctgcctggtctccacagtagcctccctgcccgggtcccagcaccctggatgcccgtctctgtcccaggcgggatggggcacagtgcaggacacagccatgtacaccaagaagagagtaccaagtagtcttttgttcagcttttactggaaactgctgtctaggaccacctgccctaaccaggaataaaggcaagacagcctgg

SEQ ID NO: 9 - DNA, 1578 bp, Homo sapiens
cgctcgcgcccggatccctcaggggttagcaggacatgagggagtgtagctctgatgcggtgacctgggccggagccctcggactagcctcagctttggtggcagcacgccctgccttgtggagccacggcctcccgggacggactccccggctctcccccagccgcccgcagccgccggatgatcctctgctcccgtctctgtctcccacagtcggcctcgctgaggatggagcccgccccgggcctcgtggagcagcccaagtgcttggaggccgggagcccggagcctgagccggcgccgtggcaggccctccctgtcctgtccgagaagcagtcaggggacgtggagctggtgctggcctacgccgcgcccgtcctggacaagcgccagacctcacgcctcctgaaggaggtgtcggccctgcacccgctccccgcccagcctcacctcaagcgggtgcggcccagccgcgatgccggcagcccccacgccctggagatgctgctttgcctggctgggccggcctcgggcccgcgctcgctggctgagctcctgccacggccggctgtggacccccgcggcctggggcaacccttcctggtgcccgtgcccgcccggccgcctctgaccaggggccagttcgaggaggcccgggcccactggcccacgtccttccacgaggacaagcaggtgaccagcgccctggctgggcggctcttctccacgcaggagcgcgccgccatgcagagccacatggagcgggcggtgtgggcggcccggcgggcagcagcgcggggcttgcgggccgtgggggccgtggtagtggacccggcctcggaccgcgtgctggccaccggccacgactgcagctgcgcggacaaccccctcctgcacgccgtcatggtgtgcgtggacctcgtggcgcgcggccagggccgcggcacctacgacttcagacccttccccgcctgctccttcgccccggccgctgccccccaggccgtccgcgcaggcgccgtgcgtaaactggacgcagacgaggacggcctcccctacctgtgcactggctacgacctgtacgtgacccgcgagccctgcgccatgtgcgccatggccctggtgcacgcacgcatcctgcgcgtcttctacggtgcgccctcgcccgacggcgccctgggcacccgcttccgcatccacgcacggcccgacctcaaccaccgcttccaggtgttccgcggggtgctggaggagcagtgccgctggctggaccccgacacgtaggcgccgccctcctgcctccggacccttcccgctcccggccgtggggcgcccctcctggacttccgggcctcgatttcttccgcacaagcctgaccgtggatttcagggacacataccgcctccagcggggagcacgggtgctgccttccgtgcggatcgagctttcctggactcggtcattggggccaccccgtgccagcggtgcccttctgcggccgcccttgctgcgtttgtgtcccctctgtctcgcgggccgggaaactgctctgatgggaaaataaacagcccaaaacc

SEQ ID NO: 10 - DNA, 1074 bp, Homo sapiens
cgccgtccacaccccagcggccctgacgctgtcccctccgcgaccctcgcctctggaaaaagtgacaggcaaggccacgcccccgcgagggccggcctggagcccgcagcccccagggcctgggacgagatcctgaaggagctagacgagtgctacgagcgcttcagtcgcgagacagacggggcgcagaagcggcggatgctgcactgtgtgcagcgcgcgctgatccgcagccaggagctgggcgacgagaagatccagatcgtgagccagatggtggagctggtggagaaccgcacgcggcaggtggacagccacgtggagctgttcgaggcgcagcaggagctgggcgacacagcgggcaacagcggcaaggctggcgcggacaggcccaaaggcgaggcggcagcgcaggctgacaagcccaacagcaagcgctcacggcggcagcgcaacaacgagaaccgtgagaacgcgtccagcaaccacgaccacgacgacggcgcctcgggcacacccaaggagaagaaggccaagacctccaagaagaagaagcgctccaaggccaaggcggagcgagaggcgtcccctgccgacctccccatcgaccccaacgaacccacgtactgtctgtgcaaccaggtctcctatggggagatgatcggctgcgacaacgacgagtgccccatcgagtggttccacttctcgtgcgtggggctcaatcataaacccaagggcaagtggtactgtcccaagtgccggggggagaacgagaagaccatggacaaagccctggagaaatccaaaaaagagagggcttacaacaggtagtttgtggacaggcgcctggtgtgaggaggacaaaataaaccgtgtatttattacattgctgcctttgttgaggtgcaaggagtgtaaaatgtatatttttaaagaatgttagtaaaggaaccattcctttcatagggatggcagtgattctgtttgccttttgttttcattggtacacgtgtaacaagaaagtggtctgtggatcagcattttagaaactacaaatataggtttgattcaaca

SEQ ID NO: 11 - DNA, 2294 bp, Homo sapiens
agttaggtcatgaggctttggccttgacaccaagggatgctgtctccttgccggaagcagctcaccaaagccggcagagaacccaggttccgtggggccacgatgtggggctccgcgggcgccccggcgctggccgacttcctgtctcctgggtcagatgctgctccgcactgcagctatggtcgcatgcagtgcctgccgaagcccgcagcaggaatgctgccttcggtgattttaatttcacttttctacttctctcaataacaaaatccgcgtttcaaactccagggaaaagaaaacggaattggctccaggaggatctgcaatcaccaccgggaactttgggaggctgggaagatggagccaaaccaatgtgtggggtggaggtgcggatctggggcggccggcctctcctacaggtctcaggtccgcaggcctggcgtgccagcacctgccacgggactggaagcccattccttgacaacgcctaaggggatcccgttgctagggctgttgccaaggcggggcaacgaggaggggctcgcttccgggaggacggcaattggcaacccggaagcggtcggtagtgcggcgctgtttaaagatggcggcggaggaacctcagcagcagaagcaggagccgctgggcagcgactccgaaggtgttaactgtctggcctatgatgaagccatcatggctcagcaggaccgaattcagcaagagattgctgtgcagaaccctctggtgtcagagcggctggagctctcggtcctatacaaggagtatgctgaagatgacaacatctatcaacagaagatcaaggacctccacaaaaagtactcgtacatccgcaagaccaggcctgacggcaactgtttctatcgggctttcggattctcccacttggaggcactgctggatgacagcaaggagttgcagcggttcaaggctgtgtctgccaagagcaaggaagacctggtgtcccagggcttcactgaattcacaattgaggatttccacaacacgttcatggacctgattgagcaggtggagaagcagacctctgtcgccgacctgctggcctccttcaatgaccagagcacctccgactaccttgtggtctacctgcggctgctcacctcgggctacctgcagcgcgagagcaagttcttcgagcacttcatcgagggtggacggactgtcaaggagttctgccagcaggaggtggagcccatgtgcaaggagagcgaccacatccacatcattgcgctggcccaggccctcagcgtgtccatccaggtggagtacatggaccgcggcgagggcggcaccaccaatccgcacatcttccctgagggctccgagcccaaggtctaccttctctaccggcctggacactacgatatcctctacaaatagggctggctccagcccgctgctgccctgctgcccccctctgccaggcgctagacatgtacagaggtttttctgtggttgtaaatggtcctatttcacccccttcttcctgtcacatgacccccccccatgttttattaaagggggtgctggtggtgagccgtgtgtgcgtgtccctgctctgctgcccgcctggctgctctgtctgctgccccctccccccaggtgggtccccctgcttttcacctatctactcctgagcttccccaacaggagcaggtttgaggggccaggcctcttggaggcccctcctgcttcgttgggttctgcttccttcccttcttagctggctcaggggcttctatgggatcctggaagttccttagggacttgcccagggtcccagggccacccacacttcatctgctccctcataggccccacctccacgtcccggctgggccccagaccccagcttcctgccctccaccgggagtctgcatggttgggagtcctgggtggaggggcctttgtgaggctggacccggctcagggcaggtggaggagctgggcctcccacagggtgcccgggcagtgccatcctggtgggggagggcagccttcaaacgtgtggggtctacagtcctcaggtctaggcagggctgccggttctccacctccccatccgccccaggccccctgcctgtgcctgccttgcaccccctctgcttgggccacggtgtctctgcattgcctgcctttttgccttcacctcttttcttccccgccccctgcacattcggggtctcagcccccaggctgtgagctccttgggggcaggccctcaataaatgtgaactgctgctgccgcctctgc

SEQ ID NO: 12 - DNA, 2260 bp, Homo sapiens
gaaagctggtgtggagggagaagcgagtgtggtccggagaaagaaggcgtggagaagagggagggagcgagagcgagagaataaatatataaataaatacgagaacgaaatccactccgcagtctccgggctcggaaactttggccccgagcgccagagcgccagagcgcgagagcgcggcgctcgccactctgaggctggcggcctcgattccggccgcgttcccccggcccccctccgccgcggggcctggtctccgggttctgccaggcgcatcagcccgcacaacttctggccgaggccagccggcagaggcggacttggggttggagtgtttgtttgtttgaacttcctcgtcgtcgccaccttccctccccccaacctccaccccacctcacccccctccccagcttctggacgcgtttgactgcagccaggggtggggggtgggggtagggagtgtgtgtggaggggagggagaagaggttaaaaaaaagaagacgaagaagacggaaagaaagagatcgcagcaggggtgaagggagcggacgggaagcgatttttgccgactttggattcgtccccggcgtgcgcaagaatggcggcccttcccggcacggtaccgagaatgatgcggccggctccggggcagaactacccccgcacgggattccctttggaagtgtccaccccgcttggccaaggccgggtcaatcagctgggaggggtcttcatcaatgggcgacccctgcctaaccacatccgccacaagatagtggagatggcccaccatggcatccggccctgtgtcatctcccgacagctgcgtgtctcccacggctgcgtctccaagattctttgccgctaccaggagaccgggtccatccggcctggggccatcggcggcagcaagcccagacaggtggcgactccggatgtagagaaaaagattgaggagtacaagagggaaaacccaggcatgttcagctgggagatccgggacaggctgctgaaggatgggcactgtgaccgaagcactgtgccctcaggtttagtgagttcgattagccgcgtgctcagaatcaagttcgggaagaaagaggaggaggatgaagcggacaagaaggaggacgacggcgaaaagaaggccaaacacagcatcgacggcatcctgggcgacaaagggaaccggctggacgagggctcggatgtggagtcggaacctgacctcccactgaagcgcaagcagcgacgcagtcggaccacattcacggccgagcagctggaggagctggagaaggcctttgagaggacccactacccagacatatacacccgcgaggagctggcgcagaggaccaagctgacagaggcgcgtgtgcaggtctggttcagtaaccgccgcgcccgttggcgtaagcaggcaggagccaaccagctggcggcgttcaaccaccttctgccaggaggcttcccacccaccggcatgcccacgctgcccccctaccagctgccggactccacctaccccaccaccaccatctcccaagatgggggcagcactgtgcaccggcctcagcccctgccaccgtccaccatgcaccagggcgggctggctgcagcggctgcagccgccgacaccagctctgcctacggagcccgccacagcttctccagctactctgacagcttcatgaatccggcggcgccctccaaccacatgaacccggtcagcaacggcctgtctcctcaggtgatgagcatcttgggcaaccccagtgcggtgcccccgcagccacaggctgacttctccatctccccgctgcatggcggcctggactcggccacctccatctcagccagctgcagccagcgggccgactccatcaagccaggagacagcctgcccacctcccaggcctactgcccacccacctacagcaccaccggctacagcgtggaccccgtggccggctatcagtacggccagtacggccagagtgagtgcctggtgccctgggcgtcccccgtccccattccttctcccacccccagggcctcctgcttgtttatggagagctacaaggtggtgtcagggtggggaatgtccatttcacagatggaaaaattgaagtccagccagatggaacagttcacctaaaatgacactgagttgggcaaaacccaggacatctcctggctaagcctctgcttccgtactatggctccaacagaaataaaatacacaacacaaatatca

SEQ ID NO: 13 - DNA, 730 bp, Homo sapiens
gccgccccgcgagaagaagagcgggaagaggcggacagcgaggccaagatttcagctgcgggacggtcaggggagacctccaggcgcagggaaggacggccagggtgacacggaagcatgcgacggctgctgatccctctggccctgtggctgggtgcggtgggcgtgggcgtcgccgagctcacggaagcccagcgccggggcctgcaggtggccctggaggaatttcacaagcacccgcccgtgcagtgggccttccaggagaccagtgtggagagcgccgtggacacgcccttcccagctggaatatttgtgaggctggaatttaagctgcagcagacaagctgccggaagagggactggaagaaacccgagtgcaaagtcaggcccaatgggaggaaacggaaatgcctggcctgcatcaaactgggctctgaggacaaagttctgggccggttggtccactgccccatagagacccaagttctgcgggaggctgaggagcaccaggagacccagtgcctcagggtgcagcgggctggtgaggacccccacagcttctacttccctggacagttcgccttctccaaggccctgccccgcagctaagccagcactgagatgcgtggtgcctccaggaccgctgcgggtggtaaccagtggaagaccccagcccccagggagaggaacccgttctatccccagccatgataataaagctgctctccca

SEQ ID NO: 14 - DNA, 2860 bp, Homo sapiens
gaaatgctttcggtaggcactccacggctgtgaagatggcggcggctgcgtggcttcaggtgttgcctgtcattcttctgcttctgggagctcacccgtcaccactgtcgtttttcagtgcgggaccggcaaccgtagctgctgccgaccggtccaaatggcacattccgataccgtcggggaaaaattattttagttttggaaagatcctcttcagaaataccactatcttcctgaagtttgatggagaaccttgtgacctgtctttgaatataacctggtatctgaaaagcgctgattgttacaatgaaatctataacttcaaggcagaagaagtagagttgtatttggaaaaacttaaggaaaaaagaggcttgtctgggaaatatcaaacatcatcaaaattgttccagaactgcagtgaactctttaaaacacagaccttttctggagattttatgcatcgactgcctcttttaggagaaaaacaggaggctaaggagaatggaacaaaccttacctttattggagacaaaaccgcaatgcatgaaccattgcaaacttggcaagatgcaccatacatttttattgtacatattggcatttcatcctcaaaggaatcatcaaaagaaaattcactgagtaatctttttaccatgactgttgaagtgaagggtccctatgaatacctcacacttgaagactatcccttgatgatttttttcatggtgatgtgtattgtatatgtcctgtttggtgttctgtggctggcatggtctgcctgctactggagagatctcctgagaattcagttttggattggtgctgtcatcttcctgggaatgcttgagaaagctgtcttctatgcggaatttcagaatatccgatacaaaggagaatctgtccagggtgctttgatccttgcagagctgctttcagcagtgaaacgctcactggctcgaaccctggtcatcatagtcagtctgggatatggcatcgtcaagccacgccttggagtcactcttcataaggttgtagtagcaggagccctctatcttttgttctctggcatggaaggggtcctcagagttactggggcccagactgatcttgcttccttggcctttatccccttggctttcctagacactgccttgtgctggtggatatttattagcctgactcaaacaatgaagctattaaaacttcggaggaacattgtaaaactctctttgtatcggcatttcaccaacacgcttattttggcagtggcagcatccattgtgtttatcatctggacaaccatgaagttcagaatagtgacatgtcagtcggactggcgggagctgtgggtagacgatgccatctggcgcttgctgttctccatgatcctctttgtcatcatggttctctggcgaccatctgcaaacaaccagaggtttgccttttcaccattgtctgaggaagaggaggaggatgaacaaaaggagcctatgctgaaagaaagctttgaaggaatgaaaatgagaagtaccaaacaagaacccaatggaaatagtaaagttaacaaagcacaggaagatgatttgaagtgggtagaagagaatgttccttcttctgtgacagatgtagcacttccagcccttctggattcagatgaggaacgaatgatcacacactttgaaaggtccaaaatggagtaaggaatgggaagatttgcagttaaagatggctaccatcagggaagagatcagcatctgtgtcagtcttctgtacggctccatgggattaaaggaagcaatgacatcctgatctgttccttgatctttgggcattggagttggcgagaggtgtcagaacaaagagaacatcttactgaaaacaagttcataagatgagaaaaatctacgagcttcttatttacaacactgctgccccctttcctcccagactctgacatggatgttcatgcaacttaagtgtgttgttcctgaactttctgtaatgtttcattttttaaatctgacaaactaaaaagtttaacgtcttctaaaagattgtcatcaacaccataatatgtaatctccaggagcaactgcctgtaatttttatttatttagggagttacataggtgatgggggaaattgttaactacctttcattttcctgggaagtcaaggttacatcttgcagaggttgttttgagaaaaaagggcccttctgagttaaggagccatagttctatcaatgatcaaaagaaaaaaaaaaaaagagaaactgttacagtatgattcagatcatttaaaaaagcaaaatcaagtgcaattttgtttacaaatggtgtatattaaagatttttctatttcagatgtactttaaagagaaatattagcttaactcttttgacatctgctattgtgacacatcccattgctggcaatgtggtgcacactccgaaacttttaactactgttttgtaagcctccaagggtggcattgcagggtccttaggcaatgttttgtttgcctttatgcagagaggtgctccaagtgctgtgattgagcaccgtgctagaggaactgtaatgcttcagaagttgtagcttatacaaaggaaacaggtcctgctggcttaatttaaacagttattgcatgaagtagcgtggaggccctggactgctgctcgttctttaggatggactgttctggtatctggtattggtttagagactgttaataagggacatcacaaggtgatgggattcatttgaagcactctatttctgttttaatggttttatccaattttgccttcccaagatttttgttctacataaaaagttcatgccactttttaat

SEQ ID NO: 15 - DNA, 1878 bp, Homo sapiens
atttcagcagctctcagggccttgggctcatcccgagtcccgggctcagtatgtggcgccttcctcgcgcgctgtgtgtgcacgctgcaaagaccagcaagctctctggaccttggagcaggcctgccgccttcatgtccactctcctcatcaatcagccccagtatgcgtggctgaaagagctggggctccgcgaggaaaacgagggcgtgtataatggaagctggggaggccggggagaggttattacgacctattgccctgctaacaacgagccaatagcaagagtccgacaggccagtgtggcagactatgaagaaactgtaaagaaagcaagagaagcatggaaaatctgggcagatattcctgctccaaaacgaggagaaatagtaagacagattggcgatgccttgcgggagaagatccaagtactaggaagcttggtgtctttggagatggggaaaatcttagtggaaggtgtgggtgaagttcaggagtatgtggatatctgtgactatgctgttggtttatcaaggatgattggaggacctatcttgccttctgaaagatctggccatgcactgattgagcagtggaatcccgtaggcctggttggaatcatcacggcattcaatttccctgtggcagtgtatggttggaacaacgccatcgccatgatctgtggaaatgtctgcctctggaaaggagctccaaccacttccctcattagtgtggctgtcacaaagataatagccaaggttctggaggacaacaagctgcctggtgcaatttgttccttgacttgtggtggagcagatattggcacagcaatggccaaagatgaacgagtgaacctgctgtccttcactgggagcactcaggtgggaaaacaggtgggcctgatggtgcaggagaggtttgggagaagtctgttggaacttggaggaaacaatgccattattgcctttgaagatgcagacctcagcttagttgttccatcagctctcttcgctgctgtgggaacagctggccagaggtgtaccactgcgaggcgactgtttatacatgaaagcatccatgatgaggttgtaaacagacttaaaaaggcctatgcacagatccgagttgggaacccatgggaccctaatgttctctatgggccactccacaccaagcaggcagtgagcatgtttcttggagcagtggaagaagcaaagaaagaaggtggcacagtggtctatgggggcaaggttatggatcgccctggaaattatgtagaaccgacaattgtgacaggtcttggccacgatgcgtccattgcacacacagagacttttgctccgattctctatgtctttaaattcaagaatgaagaagaggtctttgcatggaataatgaagtaaaacagggactttcaagtagcatctttaccaaagatctgggcagaatctttcgctggcttggacctaaaggatcagactgtggcattgtaaatgtcaacattccaacaagtggggctgagattggaggtgcctttggaggagaaaagcacactggtggtggcagggagtctggcagtgatgcctggaaacagtacatgagaaggtctacttgtactatcaactacagtaaagaccttcctctggcccaaggaatcaagtttcagtaaaggtgttttagatgaacatcccttaatttgaggtgttccagcagctgtttttggagaagacaaagaaaattaaagttttccctgaataaatgcattattatgactgtgacagtgactaatccccctatgaccccaaagccctgattaaatcaagagattccttttttaaaaatcaaaataaaattgttacaacatagccatagttact

SEQ ID NO: 16 - DNA, 3715 bp, Homo sapiens
attaacaggccgtggttaggaaggacggagaaggggcgttcgctcctttgggacttttcatgcctcgtttttttttcagatgtggcttggtctgggcgcaaggtcccagcagccagcttaagcttactcttctgtgaaaggggaaagtatcccctgtggaaagcggttaaacttgtggagggggtgcgggacgtgagttcttccccatgccaggcgaatggtgtggccttgagctggtccaggagccggctcgacgtgtctgagggaggccccggagggggcggggaggtggcccacagaacgcgggttctgtaaagagacgttgggaagattcgattccgagaagaggaagaaccggattgaaagagagccaggccgctgagggggagggggctgctaagatggcgtcggcctcctccgggccgtcgtcttcggtcggtttttcatcctttgatcccgcggtcccttcctgtaccttgtcctcagcatctggaatcaagagacccatggcatctgaggtgccttatgcctctggcatgcccatcaagaaaataggccatagaagtgttgattcctcaggagagacaacatataaaaagacaacctcatcagccttgaaaggtgccatccagttaggcattacccacactgtggggagcctgagtaccaaaccagagcgtgatgtcctcatgcaagatttctacgtggttgagagtatcttctttcccagtgaagggagcaacctgacccctgctcatcactacaatgactttcgtttcaagacctatgcacctgttgccttccgctacttccgggagctatttggtatccggcccgatgattacttgtattccctctgcagtgagccgctgattgaactctgtagctctggagctagtggttccctattctatgtgtccagcgacgatgagttcattattaagacagtccaacataaagaggcggaatttctgcagaagctgcttccaggatactacatgaacctcaaccagaaccctcggactttgctgcctaaattctatggactgtactgtgtgcaggcaggtggcaagaacattcggattgtggtgatgaacaatcttttaccaagatcggtaaaaatgcatatcaaatatgacctcaaaggctcaacctacaaacggcgggcttcccagaaagagcgagagaagcctcttcccacatttaaagacctagacttcttacaagacatccctgatggtctttttttggatgctgacatgtacaacgctctctgtaagaccctgcagcgtgactgtttggtgctgcagagcttcaagataatggattacagcctcttgatgtcaatccataatatagatcatgcacaacgagagcccttaagcagtgaaacacagtactcagttgatactcgaagaccggccccccaaaaggctctgtattccacagccatggaatccatccagggagaggctcgacggggtggtaccatggagactgatgaccatatgggtggcatccctgcccggaatagtaaaggggaaaggcttctgctttatattggcatcattgacattctacagtcttacaggtttgttaagaagttggagcactcttggaaagccctggtacatgacggagacactgtctcagtgcatcgcccaggcttctacgctgaacggttccagcgcttcatgtgcaacacagtatttaagaagattcccttgaagccttctccttccaaaaagtttcggtctggctcatctttctctcggcgagcaggctccagtggcaactcctgcattacttaccagccatcggtctctggggaacacaaggcacaagtgacaacaaaggcagaagtggagccaggcgttcaccttggtcgtcctgatgttttacctcagactccacctttggaggaaatcagtgagggctcgcctattcctgaccccagtttctcacctctagttggagagactttgcaaatgctaactacaagtacaaccttggaaaagcttgaagttgcagagtcagagttcacccattaagcgcaaagcctcagaagacctggaacaagattctgccatctctgtgatcccaagatgtcagcccttgccccagcaatgctgaattttcttctacttggtcatcaaaaaaggagtgtaatagaagtgaggggagctgctcctccatcttcttcctgaagaagaaccttctctccttcctcttcctcatgaatgggccttagtgcctcagagagttgaggaccgcagcatcccctccactccagagttgggtggtatggattttcaactggccaaccctttgcctccactattgaatttttttcagacccccattcttcatgctggaaatgggattgctggacttggcagctttctttcccctcgtctttgactaggaaccggactcttaatttcctcaggacagactagctggcacattatccctaccttagttctttctctctgactcctggaagaatactcctgtaatctctgtaaaggtttttgggggataagggtgtttaaccacctcccagctttcttcttctttttttttttctgaaaaaaggaaaaagcacacagcacacaatttcaagccattttcagatcagaactccagaagtgttgacaagatgcctattcgtagagttccctcagaagagccatggtgtttatgaagagaagagtagtgattgctctgccagaagcagctcctctttaaactcctcctctcttgatgaatttcttaaggctgaaggaatgaagagagtgggacatggggtaatctttatcccttttgttaaaacaggaggcagccatgggctgggagatcatagcccttcctaggcagaatcctgttcactgccaggctatagtaattattactattttgcaatttgaaatatattctggttgtttttctaaatgtgaagacttaccaaatgaattttagatcattctccagaggagattttttttgctcttctcatcttttccaacagtgttctcctgtttgtggagctaaggtaaagaggggacacttctgtctgtttaacagacagtccatatctgtgaggccagcaaatattttcttaaactcatggggagacagcagattcttgccttggtgaggtcattgctgtgccatatgtcctacccccctgtcttcatgcagggaagttggaaatgggggctacatatgccctctcctccccgtctacaagagttgtggttttccatctgatccttccactcttgtcaggggaagaagggggcctggtatctcaggcagattgttgaattcctgttctatcccttctctatcccaccctgccttgataatatgttagcccataccccaaataactgtctatattagacacccccagccagtttctggctgcctgtctttgctgccatgttttttacaagaaggaaagaattcttgctatttttttttcataatttactatttatgatgtatttaagtgttttattaaggacagagttctgttaggggtgggagggaatatttgagggagggctgggtcttagggaaaggaatggggaagcaacatttttattaagtgttactatttgcctctactttgtattgttcagaaatggcaaatacaatataaaagtgatatatggttttaatgtaataaactttaatgagttattta

SEQ ID NO: 17 - DNA, 5470 bp, Homo sapiens
gcgcagcccgcagaggcgctgcggcccgtgcagccccggaggcccctcgcggagaaggcggcggcggaggagaggccgagttaccgcccgccgcccgcgcccccccaaccccgccgccgccgccgccgccgccactgccccccctccccgcggcgccgcatcttgaatggaaacatggcggtgccggctcggacctgcggcgcctctcggcccggcccagcgcggactgcgcgcccctggcccggctgcggcccccaccctggccccggcacccggcgcccgacgtccgggcccccgcgcccgctgtggctgctgctgccgcttctaccgctgctcgccgcccccggcgcctctgcctacagcttcccccagcagcacacgatgcagcactgggcccggcgtctggagcaggaggtcgacggcgtgatgcggatttttggaggcgtccagcagctccgtgagatttacaaggacaaccggaacctgttcgaggtacaggagaatgagcctcagaagttggtggagaaggtggcaggggacattgagagccttctggacaggaaggtgcaggccctgaagagactggctgatgctgcagagaacttccagaaagcacaccgctggcaggacaacatcaaggaggaagacatcgtgtactatgacgccaaggctgacgctgagctggacgaccctgagagtgaggatgtggaaagggggtctaaggccagcaccctaaggctggacttcatcgaggacccaaacttcaagaacaaggtcaactattcatacgcggctgtacagatccctacggacatctacaaaggctccactgtcatcctcaatgagctcaactggacagaggccctggagaatgtgttcatggaaaaccgcagacaagaccccacactgctgtggcaggtcttcggcagcgccacaggagtcactcgctactacccggccaccccgtggcgagcccccaagaagatcgacctgtacgatgtccgaaggagaccctggtatatccagggggcctcgtcacccaaagacatggtcatcatcgtggatgtgagtggcagtgtgagcggcctgaccctgaagctgatgaagacatctgtctgcgagatgctggacacgctgtctgatgatgactatgtgaatgtggcctcgttcaacgagaaggcacagcctgtgtcatgcttcacacacctggtgcaggccaatgtgcgcaacaagaaggtgttcaaggaagctgtgcagggcatggtggccaagggcaccacaggctacaaggccggctttgagtatgcctttgaccagctgcagaactccaacatcactcgggccaactgcaacaagatgatcatgatgttcacggatggtggtgaggaccgcgtgcaggacgtctttgagaagtacaattggccaaaccggacggtgcgcgtgtttactttctccgtggggcagcataactatgacgtcacaccgctgcagtggatggcctgtgccaacaaaggctactattttgagatcccttccatcggagccatccgcatcaacacacaggaatatctagatgtgttgggcaggcccatggtgctggcaggcaaggaggccaagcaggtgcagtggaccaacgtgtatgaggatgcactgggactggggttggtggtaacagggaccctccctgttttcaacctgacacaggatggccctggggaaaagaagaaccagctgatcctgggcgtgatgggcattgacgtggctctgaatgacatcaagaggctgacccccaactacacgcttggagccaacggctatgtgtttgccattgacctgaacggctacgtgttgctgcaccccaatctcaagccccagaccaccaacttccgggagcctgtgactctggacttcctggatgcggagctagaggatgagaacaaggaagagatccgtcggagcatgattgatggcaacaagggccacaagcagatcagaacgttggtcaagtccctggatgagaggtacatagatgaggtgacacggaactacacctgggtgcctataaggagcactaactacagcctggggctggtgctcccaccctacagcaccttctacctccaagccaatctcagtgaccagatcctgcaggtcaagtattttgagttcctgctccccagcagctttgagtctgaaggacacgttttcattgctcccagagagtactgcaaggacctgaatgcctcagacaacaacaccgagttcctgaaaaactttattgagctcatggagaaagtgactccagactccaagcagtgcaacaacttccttctgcacaacctgatcttggacacgggcatcacgcagcagctggtagagcgtgtgtggagggaccaggatctcaacacgtacagcctactggccgtgttcgctgccacagacggtggcatcacccgagtcttccccaacaaggcagctgaggactggacagagaaccctgagcccttcaatgccagcttctaccgccgcagcctggataaccacggttatgtcttcaagcccccacaccaggatgccctgttaaggccgctggagctggagaatgacactgtgggcatcctcgtcagcacagctgtggagctcagcctaggcaggcgcacactgaggccagcagtggtgggcgtcaagctggacctagaggcttgggctgagaagttcaaggtgctagccagcaaccgtacccaccaagaccagcctcagaagtgcggccccaacagccactgtgagatggactgcgaggttaacaatgaggacttactctgtgtcctcattgatgatggaggattcctggtgctgtcaaaccagaaccatcagtgggaccaggtgggcaggttcttcagtgaggtggatgccaacctgatgctggcactctacaataactccttctacacccgcaaggagtcctatgactatcaggcagcctgtgcccctcagccccctggcaacctgggtgctgcaccccggggtgtctttgtgcccaccgttgcagatttccttaacctggcctggtggacctctgctgccgcctggtccctgttccagcagcttctctacggcctcatctaccacagctggttccaagcagaccccgcggaggccgaggggagccccgagacgcgcgagagcagctgcgtcatgaaacagacccagtactacttcggctcggtaaacgcctcctacaacgccatcatcgactgcggaaactgctccaggctgttccacgcgcagagactgaccaacaccaatcttctctttgtggtggccgagaagccgctgtgcagccagtgcgaggctggccggctgctgcagaaggagacgcactcggacggcccggagcagtgtgagctagtgcagagaccgcgataccggagaggcccgcacatctgcttcgactacaacgcgacagaagatacctcagactgtggccgcggggcctccttcccgccgtcgctgggcgtcctggtctccctgcaactgctgctcctcctgggcctgccgccccggccgcagcctcaagtcctcgtccacgcctctcgccgcctctgagcaccctgccccaccccacctccactcccacctcacccggcctcttcgcctttcccaccctcctgccccacactccccgccttagagcctcgtccctccctcactgaaggacctgagctggccaggccctgagagtctggtctgcgccttgggatggggagtcccaaagcgggacgccgcaggtgtttggcacccaaatcacatctcacctccgaactgttcaagtgtccccagacccttcttgcctgctgggctccccccagtgggatgggacagggaggccacacgcactggtgccaaaaccaggcctctgctgccgcccttcctggaggctgcctatgttgggggggaccctgcctcagctgacccggcctctctgccccacccaagcccaaacttggtttctgtgagaatagtggaggaaggtgagatggccagtttgaagcctgtgcctcccagcttaaatcctagcaggagagaggctctggggcagcccccatgggctcctgcccctttcaggcctacagccacatccccaagcccaccaggtgtcaggatagtcacagtgataccagttcagacactaccccatatacacctggaacattgaggatggaaactggactcacattcgacataccccactgggcacacgcacaaacacacacactatggggtggggtgggtgtaggggcttacaaagccttacacagggcgaggggttggtgggagggttggcacctgcacactccatctcctgctcaccacctgcctctaatctgagctgcagcctggctggtcctcccatttctaaagctgaatgtcaaacagtgccaaatgctggggcagggggtgaagaaccctctgtcccacccctagccaccagtgtcctccaagtgccccctcacctctccaggtgctcattgtaaccatttctcactagtgtcaggcccccagtgggaccacatgccactgcctgcacctttcggcagaggaacccccaccagacatcaccctttgccttagcaggggtgactttgtctctcctggctgggccatccttccgccaatctggcccttacacactcaggcctgtgcccactccctatctccttcccacccctacacacacactccctgcttgcaggaggccaaactgtccctcccttgctgaacacacacacacacacacacacacaggtggggactgggcacagctcttcacaccattcattctggtcatttcccccaaaggcatcccagcctgggggccagtggggaactgagggcaaggggatatagtgatggggctcagatggactgggaggagggggagggtgatgcattaattaatggcttcgttaattaatgtcatgttgcttgtcgctttctcagtgtgtgtgtgtggtccatgcccactgctggtgccagggtgggtgtccatgtgcacccggcctggatgccagctgtgtccttcgggggcgtgcgtgtaactgtagtgtagtcaggtgctcaatggagaatataaacatatacagaaaaatatatattttaagtttaaaaaacagaaaaacagacaaaacaatccccatcaggtagctgtctaacccccagctgggtctaatccttctcattacccacccgacctggctgcccctcaccttgggctgggggactggggggccatttccttttctctgccctttttttgttgttctattttgtacagacaagttggaaaaacaacagcgacaaaaaagtcaagaaactttgtaaaatatcgtgtgtgtgattccttgtaaaatattttcaaatggtttattacagaagatcagttattaaataatgttcatattttcacttc

SEQ ID NO: 18 - DNA, 1948 bp, Homo sapiens
ctacttcattctacggccgagaccggaggatgttccctgctcaggaggaggccgacaggaccgtgtttgttgggaatttagaggcccgagttcgggaagagattctgtacgagctgttccttcaggcggggccactaaccaaagtgactatatgcaaagacagagaaggaaagccaaagtcttttggatttgtctgctttaaacacccagaatcggtgtcttatgccatagctttgctgaatggaattcgtttatatggaagaccaattaacgtgcagtatcgatttggtagttctcgctcttctgaaccagctaaccaaagttttgagagctgtgttaagataaattcacacaactacaggaatgaagaaatgttggtgggcagatcttcctttcccatgcagtattttccaattaataatacttctttacctcaagaatattttctctttcagaagatgcagtggcatgtgtataatccagtgctgcagcttccttactatgaaatgacagctccacttcctaatagtgcatccgtgtcttcctcactgaatcatgttccagatcttgaggctggacccagctcatataaatggactcaccaacaaccaagtgactctgacctttatcagatgacagctccacttcctaatagtgcatccgtgtcttcctcactgaatcatgttccagatcttgaggctggacccagctcatataaatggactcaccaacaaccaagtgactctgacctttatcagatgaataaacgaaagagacaaaagcaaacaagtgatagtgatagtagcacagacaacaacagaggcaacgaatgtagccaaaagttccgaaagtctaagaagaagaaaagatactagtattacctacaaatgaaacttacctacactgatcttagttctcttatgaaaaaaataagatgttatcccatcaaataaacaatgtcatggctatcttgtcttttgaaatatgtagtaataagacttatctctggtttgctgttcaatttttgccttgaacgacaaaagctttctaaaaatagtataatgtaccactttttgtatttgtcatgatatttttgacccattggcaacaaatagactattgtcattttattagtaccaatgatgaaatttcaccaaactattaatcaaaagtcacttattgaacacattgataaagcatcatgttccctttgattatcccctataaccaacactcaactacaaataggctgggattcaatgtggagtggtggatttcctgaaagaaagtagtgcagatatttaaggattgcatattgttcctaatgaggatgtaataaacaggcattagtacccctttcttttagtacctaaatatgttgtttctgagccatattcttcttcaggtttattttataaagtgaggacatatgataatgataccaaaggaaagataattatcatgaaaccaacttttggatcattccctttttatacaattgtgtatttatagggataccttcctcttctcacatattaattgtatgtcattaaaatcagttggctatgtcagtgtgtattattcacctcttttgctagcaaggtttgagatgctatattaacatttaaatcatgaaaatgagcaagtaaatagaataatattttattaatgtatgatatgtaatacttattgtctaaatcaagtttcctatttttggtttatttattttagaagaaaaataaaattatttgggcatttttgtttatagctcattacaaactagagtgatgaatatatatatttactaaagctaattgaaagagtcatgcaactcagttgggaattaaccactcaattcaatagtaaaagccatgcttggatgtttcttttgcatgttgcctagcattttatagatatttattatttaaaaaaataaagatatgttttt

SEQ ID NO: 19 - DNA, 2312 bp, Homo sapiens
ggcgcgctaggctcacaaaggcaggcacagactgcaaccctgctcagtgctccgggcgcttcaggctggcttgggtcctgctgctccaaccccaagggccctggagcgctccctgatacctccatcactcaccatggccagccagttctgcctccctgaatccccatgtctctcgcccctgaaacccttgaagccacatttcggagacatccaagagggcatctacgtggcgatccagcgcagtgacaagcggatccacctcgctgtggtcacggagatcaacagagaaaactattgggtcacggtagagtgggtggagaaagcagtcaaaaaaggcaagaagattgacctggagaccatactcctgctgaatccagctctggactctgctgaacaccccatgccgcccccgcccttatcccccttggctctggcgccctcttcggccatcagggaccagcgtaccgccacgaaatgggttgcgatgatcccccagaaaaaccaaacagcctcaggggacagcctggatgtgagggtccccagcaaaccttgtctgatgaagcagaaaaagtctccctgcctctgggaaatccagaaactgcaggagcagcgggaaaagcgcaggcggctgcagcaggagatccgagctagacgcgccctcgatgtcaataccagaaaccccaactacgaaatcatgcacatgatcgaagagtatcgcaggcacctggacagcagcaagatctcagtcctggagcccccgcaagaacatcgcatctgcgtctgcgtgaggaagcggcctctcaaccagcgagagacaaccttaaaggacctggatatcatcaccgtcccctcggacaatgtggttatggtgcatgagtccaagcaaaaggtggacctcactcgctacctgcagaaccagaccttctgcttcgaccatgccttcgatgacaaagcctccaacgagttggtgtaccagttcaccgcccagccactggtggagtccatcttccgcaagggcatggccacctgctttgcctatgggcagacgggaagtgggaagacgtacaccatgggtggagacttttcaggaacggcccaagattgttctaagggcatttatgctctggtggcacaggatgtctttctcctgctcagaaactccacatatgagaagctggacctcaaagtctatgggacattttttgagatttatgggggcaaggtgtatgatttgttgaactggaagaagaagctgcaagtccttgaggatggcaatcagcaaatccaagtggtcgggctgcaggagaaagaggtgtgttgtgtggaggaagtgctgaacctggtggaaatagggaatagctgtcggacttccaggcaaacacctgtcaacgctcactcatccaggagccatgcagtgttccagatcatcctgaagtcaggacggataatgcatggcaagttttccctcgttgatttagctgggaatgaaagaggagcagatacaaccaaggccagccggaaaaggcagctggaaggggcagagattaacaagagtcttctagccctcaaagaatgtattctggctttgggtcagaacaagcctcacaccccattcagagccagcaaactcacactggtgctccgggactcctttataggccagaactcctccacttgcatgattgctaccatctctccggggatgacctcttgtgaaaacactctcaacactttaagatatgcaaacagagtaaaaaaattaaatgtagatgtaaggccctaccatcgtggccactatccgattggacatgaggcaccaaggatgttaaaaagtcacatcggaaattcagaaatgtcccttcagagggatgaatttattaaaataccttatgtacagagtgaggagcagaaagagattgaagaggttgaaacattacccactctgttagggaaggataccacaatttcagggaagggatctagccaatggctggaaaacatccaggagagagctggtggagtacaccatgatattgatttttgcattgcccggtctttgtccattttggagcagaaaattgatgctctgaccgagatccaaaagaaactgaaattattactagctgacctccacgtgaagagcaaggtagagtgaagccaatggcgagagatcaggtccgaaatgctgcattgctgcagtttccaccactcttatacaggaaaactgtccaaattatctaaagatcctcctgagaagcttaaaacatcttaaaatacactgatgggaaacatgctctttcttctgcctctgt

SEQ ID NO: 20 - DNA, 5357 bp, Homo sapiens
ggcggccaggtggaggacctgagcaagcagctcaagcgtgtggacggccaggtgcagggcatcgccacgcacgtgcagcacttctcccaggccagcgggcttgacctggccgcgctagagtggccggaggagcaggaggtgggcgtgcgggcgttcgatagggtgcggactgggagtatcatgaaggacgccgccgaggagctcagctttgccagggtacttttacagcgggttgatgaactagagaagctattcaaagatcgggagcaattcctggaactagtcagccggaagctgagtttggttcctggtgcagaagaagtcaccatggtcacctgggaagagctggagcaggcgattacggacggctggagagcctcacaagcgggctcagaaacacttatgggattttctaagcacggagggttcacttccttaacatcacctgaagggactctaagcggagactctaccaagcaaccaagtattgagcaggctctggattctgccagtggtcttggcccggatcggactgcatcaggatctggtggcacagcacacccctctgatggggtttccagtagggaacaaagcaaggtcccctctggtactgggagacagcagcagccgagggcccgtgatgaagctggcgtgccacgactccatcagtcttctacattccaattcaaatcagactcagatcgtcacaggagtagagagaagcttacctcgacacaaccaagaagaaatgcacgtcctggtccagttcaacaggacttacccttggccagagaccagcccagtagtgtgcccgctagccagagtcaggtccatctaaggccagatcgtcgtgggttagaaccaactggcatgaatcagcctggattagtgcctgctagcacttacccacatggtgtggtacccctcagcatgggtcagcttggtgtgccaccacctgaaatggatgatcgggaattgataccatttgtcgtggatgagcaacgtatgttgccaccatcagtacctggcagagaccagcaaggattggaactacctagcacagaccaacatggtctggtttcagtcagtgcatatcagcatggtatgacatttcctggcacagaccaacgcagtatggaaccacttggcatggatcagcgtggatgtgtaatatcaggcatgggtcagcaaggactagtaccccctggtatagaccagcaaggattgacattgcctgtcgtcgatcaacatggcctggttctaccttttacagaccagcatggtttggtatcacctggtttgatgccaattagtgcagatcagcaaggttttgtgcagcccagtttggaagcaactggcttcatacaacctggcacagagcagcatgatttgatccagtctggcagatttcagcgtgctttggtgcagcgtggtgcatatcagcctggcttggtccaacctggtgcagatcagcgtggtttggtccggcctggaatggatcagtctggtttggcccaacctggtgcagatcagcgtggtttggtctggcctggaatggatcagtctggtttggcccaacctggtagagatcagcatggtttgatccagcctggcacaggtcagcatgatttggtccaatctggcacaggtcagggtgtcttggtacagcctggtgtagatcagcctggcatggtccaacctggcagatttcagcgtgctttggtgcagcctggtgcatatcagcctggcttggtccaacctggtgcagatcagattgatgtggtgcaacctggtgcagatcagcatggtttggtacaatctggtgcagatcagagtgatttggctcaacctggtgcagttcagcatggtttggtccaacctggagtagatcagcgtggtttggcacaacctcgtgcagatcatcagcgtggtttggtcccacctggtgcagatcagcgtggtttggtccaacctggtgcagatcagcatggtttggtccaacctggagtggatcagcatggtttggcacaacctggtgaagttcagcgtagtttggtgcaacctggtatagttcagcgtggtttggtgcaacctggtgcagttcagcgtggtttggtgcaacctggtgcagttcagcgtggtttggtccaacctggagtggatcagcgtggtttggttcaacctggtgcagttcagcgtggtttggtccaacctggtgcagttcagcatggtttggtccaacctggtgcagatcagcgtggtttggtccaacctggagtggatcagcgtggtttggtgcaacctggagtggatcagcgtggtttggtccaacctggaatggaccagcgtggtttgatccaacctggtgcagatcagcctggtttggtccagcctggtgcaggtcagctgggtatggtgcagcctggaataggtcagcaaggtatggtgcaacctcaggcagatccacatggcctggtacaacctggtgcctatcctcttggtttggtacaacctggtgcatatttgcatgatttatctcaatctgggacatatccacgtggtctggtgcagccaggaatggatcagtatggtttgagacaacctggtgcatatcagccaggcttgatagcaccaggcacaaagcttcgtggctcttcaacattccaggcagattctacaggttttatatcagtacgtccatatcaacatggtatggtacctcctggcagagaacaatacggccaggtgtcaccactcctagccagtcaaggtttggcatcacctggtatagatcgaaggagtttggtaccaccagaaacttatcagcaaggtttgatgcatcctggcacagaccagcacagcccaataccactgagtacaggtttgggatctacacacccagatcaacagcatgtggcatcacctggcccaggtgagcatgaccaggtatacccagatgcagctcagcatggccatgctttctctctctttgacagtcatgattcaatgtatcctggttatcgtggcccagggtatctaagtgctgatcagcatggccaggaaggtttggatccaaatagaacacgagcctcggaccgacatggaattcctgcccagaaggccccaggccaagatgtcactcttttcaggagtccagactccgtcgaccgagtcttatcagaagggagcgaagtctcgagtgaagtcctgagtgagcgacgcaattcactgcgtagaatgagttctagtttccccacggcagtggagacatttcatctgatgggagagctcagtagcctctatgtggggctaaaggagagtatgaaggatctggatgaggagcaggccggccaaaccgacttggagaagatccagttcctgctggcacagatggtcaaaaggaccatacctcctgaactgcaggagcagctgaagaccgtaaagacgctagccaaagaagtttggcaggagaaagcaaaagtggaaaggctgcagaggatcctggaaggggaagggaatcaagaagcagggaaggaactgaaagctggagagctgagattgcagctgggtgtcctcagagtcaccgtggctgacatagaaaaggagctggccgagttgagggagagccaagacaggggcaaggctgccatggaaaattctgtctctgaagcctccctttacctgcaggaccagttggacaagctcaggatgatcattgagagcatgctgacctcctcctccacgctcctgtccatgagcatggccccgcacaaggcccacaccttggctcctggccagatcgaccctgaggccacctgtccagcctgcagcctggatgtgagccatcaggtcagcacgctggtgcggcgctatgagcaactccaagacatggtcaacagcctggccgtctcccgaccctccaagaaggccaagctccagagacaggacgaggagctgctgggccgtgtgcagagtgccatcctgcaggtgcagggtgactgcgagaagctcaacatcaccaccagcaacctcatcgaggaccatcggcagaaacagaaggacattgctatgctgtaccagggtctggagaagctcgaaaaggaaaaggccaacagggagcacctggagatggagatcgatgtgaaagccgacaagagtgctctggccaccaaagtgagccgtgtccagtttgatgccaccacggagcagctgaaccacatgatgcaggagctggtggccaagatgagcgggcaggagcaggactggcagaagatgctggacaggctgctcacagagatggacaacaagctggaccgcctggagctggacccagtgaagcagttgctggaggatcggtggaaatcgctgcgacagcagctcagggagcgccccccactctaccaggcagacgaggcggctgccatgcggaggcagctcctggcacatttccactgcctctcatgtgaccggcccttggagacacctgtgactggacatgccatccccgtgacccccgcgggtccaggcctacctgggcaccattccatccgcccctacacggtgtttgaactggagcaggtccggcagcatagccgcaacctcaagctgggcagcgccttccctcggggtgacctggcgcagatggagcagagcgtggggcgcctgcgctccatgcactccaagatgctgatgaacattgagaaggtgcagatccacttcgggggctccaccaaggccagcagccagataatccgcgagctgctgcacgcccagtgcctgggctccccctgctacaaacgggtgacagatatggctgattacacctactcaactgtgccccggcgctgcgggggcagccacaccctcacctacccctaccaccgcagccgcccgcagcaccttccccggggcctgtatcctactgaagagatccagattgccatgaagcatgatgaggtggacatcttgggcctggatggccacatttacaagggacggatggacacaaggctgccaggcatcctccgaaaagacagctcagggacctcaaagcgcaagtcccagcagcccaggccccacgtgcacaggccgccatccctcagcagcaatggccagctgccctctcggccacagagcgcccagatttcggctggcaacacctcagaaagatagaccttcctccgagggccgtctctcccagccgaacacagcccacccgcccagctccgccgcggtggcaaacagggggctggagaggcacgtggacatgcctcctggggaggggctcgaggagcccacgcgggggccgcggtccagcaccgctcagtgagcggaggtgtaaataaacattcaggagg

SEQ ID NO: 21 - DNA, 1787 bp, Homo sapiens
agcagctggaggttatcgaaaatctgttgtaaggagcattgttaacttagaataaaaatcgaatccaaaacacgcttttgcaataccccctcccgatatccaccgaggcaaaggcagaattaagaagcagggtcttgagatgtaggaaaggagaatgaaccccacgcgggaagaggacaggccgccctgactttggtccactcagccagggggtgagcaccacctgtcttggtgaatgactctgagcccatctcaggtgtggctgcaggtgacacatcttctcttcctgtccaccccccagccccatggcgtcccttcctgtcctgcagaaggagagcgtgttccagtcgggagcccatgcctacagaatccctgccctgctctacctgcctgggcagcagtccctgctggccttcgcggaacagcgggcaagcaagaaggatgagcacgcagagctgattgtcctgcgcagaggagactacgacgcacccacccaccaggttcagtggcaagctcaggaggtggtggcccaggcccggctggatggccaccggtccatgaacccatgccccttgtatgacgcgcagacggggaccctcttcctcttcttcattgccatccctgggcaagtcacggagcaacagcagctgcagaccagggccaatgtgacgcggctgtgccaagtcaccagcactgaccacgggaggacctggagctcccccagagacctcactgatgcggccatcggcccagcctaccgggagtggtccacctttgcagtgggcccggggcattgtttgcagcttcacgacagggcccggagcctggtggtgcccgcctacgcctaccggaaacttcaccccatccaaaggccgatcccctctgccttctgcttcctcagccatgaccatgggcgcacgtgggcgcgagggcactttgtggcccaggacaccctggagtgccaggtggccgaagtcgagactggggagcagagggtggtgaccctcaacgcgagaagccacctccgagccagggtccaggcccagagcaccaatgacgggcttgatttccaggagtctcagctggtgaagaagctggtggagccgccgccccagggctgccaggggagcgtcatcagcttccccagcccccgctcggggcctggctccccagcccagtggctgctctacactcaccccacacactcctggcagagggccgacctgggtgcctacctcaacccgcgacctccagcccctgaggcctggtcagagccggtactgctggccaagggcagctgtgcctactcagacctccagagcatgggcaccggccctgatgggtcccccttgtttgggtgtctgtacgaagccaatgattacgaggagattgtctttctcatgttcaccctgaagcaagccttcccagctgagtacctgcctcagtgagcctgtggtgcccacctcaagggcctgcctttcacctgcacacccagctcggaggctctgcggctgcctctccttcccgtggcccctggacgtgggggccactctgggctcccttcggcgcccgtgtgtggagagaggtgcacctcttgctcttttcctcctgcgtggttccagtcttcccaaaaggttctattttcagcccagaaaccaaaagtgtctggcttcccatagcccctccatagggaaggcgtggagggtcctgcagcgcagctgtcaccttgtctgcctgtcccctacccccagctttgtgtaggtcttgacaaatttctagttcaactc

SEQ ID NO: 22 - DNA, 2256 bp, Homo sapiens
cacgcggcaggcggtggcgggattctgccgcgtgcgctttcccgccccgcctcgcctagcctcgtcctgcgctcgccacgcctcgggctgtccgttgggccacgcagaccgcgctgcgctcgctccgtcgcggctccgcgtgccccaccttctggctagttttttctagagcccaggctccgcccgtttcccgcttccagggcccggttcgttcccgcccgcacccgtccctctcctctgcacccctgctgcttctgctttgaaggcggaggctccatgttgtcccctcagcgagtggcagcagctgcctcaagaggagcagatgatgccatggagagcagcaagcctggtccagtgcaggttgttttggttcagaaagatcaacattcctttgagctagatgagaaagccttggccagcatcctcttgcaggaccacatccgagatcttgatgtggtggtggtttcagtggctggtgccttccgaaagggcaagtccttcattctggattttatgctacgatacttatattctcagaaggaaagtggccattcaaattggttgggtgacccagaagaaccgttaacaggattttcctggagagggggatctgatccagaaaccactgggattcaaatctggagtgaagttttcactgtggagaagccaggtgggaagaaggttgcagttgttctgatggatacccagggggcatttgacagccagtcaactgtgaaagactgtgctaccatctttgctctaagcactatgactagttctgttcagatttataatttatctcagaacattcaagaagatgatcttcaacagctgcagctcttcacagaatacggtcgtctggcaatggatgaaattttccaaaagcctttccagacactgatgtttttggttagagattggagtttcccttatgaatatagctatggactccaaggaggaatggcatttttggataagcgtttacaggtgaaggaacatcaacatgaagaaattcagaatgttcgaaatcacattcactcatgtttctccgatgtcacctgctttctcttaccacatccaggactccaggtggccacaagccctgactttgatgggaaattaaaagatattgctggtgaattcaaagagcagttacaggcactgataccgtatgtattaaacccatctaagttaatggaaaaggagatcaatggctcaaaggtcacctgtcggggactactggagtattttaaggcatatattaaaatttatcaaggagaagatctgcctcaccccaagtccatgcttcaggccactgctgaagccaacaacttagcagctgcagcctctgccaaggacatttattataacaacatggaagaggtttgtgggggagagaaaccttatttgtctccagacattctagaggagaagcactgtgaattcaaacaacttgctctggaccattttaagaagaccaagaagatgggtgggaaggatttcagctttcgttaccagcaggagctggaggaggaaatcaaggaattatatgagaacttctgcaagcacaatggtagcaagaacgtcttcagcaccttccgaacccctgcagtgctgttcacgggcattgtagctttgtacatagcctcaggcctcactggcttcataggtcttgaggttgtagcccagttgttcaactgtatggttggactactgttaatagcactcctcacctggggctacatcaggtattctggtcaatatcgtgagctgggcggagctattgattttggtgccgcatatgtgttggagcaggcttcttctcatatcggtaattccactcaggccactgtgagggatgcagttgttggaagaccatccatggataaaaaagctcaatagcatcttaacgtgaagatcaaacaagaacacaacaagcccctactgatttctgggtttctgccacggccacaggttcatatccagaggaatggcagatctgagacgatccaggaagagctaaaacatggccctgtaataaatgagcagacctctcctgtggtttcaaattattaaacacacttccatttctcttggaagcatttcttttccttgctgttatagatgcaagcctgtgtctattttcatattactctgctttgtgcactttatggaggaggaagctagaggaaaaatggaaatgcagcttttaagttctttatgtgccacttagtgccttttaagattgattccatg

SEQ ID NO: 23 - DNA, 495 bp, Homo sapiens
cagccctgacgcttccgtggggccacttccttttttgtctcctagcaacggcgggtagcgttgttgacatcccgggaggctgtgccgccggcctgagcccagagtttcgcggcctccgcgatggcagaggtggaggaaaccttaaagaggatccagagtcataaaggggttattggaactatggttgtaaatgcagaaggtattcccatccgaacaaccttggacaactcaacaactgttcaatatgcaggccttcttcatcacctgacaatgaaagccaaaagcacagttcgtgatattgatcctcagaacgacctgacttttcttaggatcagatcaaagaaacatgaaatcatggtagctccagataaggaatatcttctgatcgtcattcagaatccatgtgaatagacctgcgatggccaaggctgtttaagcgacactgggttggaaacacttggctctctcatgagtattaaaattctatttcaatct

SEQ ID NO: 24 - DNA, 3894 bp, Homo sapiens
cccagctgtgaccagagcaaccagagcctgccacccgacgcaaccccaggctcactcgctcacccccctgggccctcctgcttccggccgggggcaccatggcctgccgctcctgcgtggttggcttcagcagcctcagcagctgtgaggtgaccccggtgggcagcccccggcctggaacctcaggatgggacagctgcagggcccccgggccgggcttcagctcccgcagcctcacaggctgctggtcggctggcactatctccaaggtgactgtgaaccccggcctgctggtgcccctggatgtcaagttggaccccgctgttcagcagctgaagaaccaggagaaggaggagatgaaggccctcaatgataaatttgcctccctaattggcaaggtgcaagccctggaacagcgcaaccagctgctggagacacgctggagcttcctgcagggccaggactcagccatcttcgacctcgggcatctctatgaggaatatcagggccggctgcaggaggaactgcgcaaagtgagccaggagcgggggcagctggaggccaacctgctgcaggtgctggagaaggttgaggagtttcgaatcaggtatgaggatgagatctccaagcgcacagacatggagttcacctttgttcagctgaagaaggacctggatgcagagtgtcttcatcggactgaactggaaaccaagttaaaaagcctggagagcttcgtggagttgatgaaaaccatctatgagcaggagctgaaggacctggcagcacaggtgaaggatgtgtcggtgaccgtcggcatggacagccgctgccacatcgacctgagcggcatcgtggaggaggtgaaggcccagtatgacgccgtcgcggctcgcagcctggaggaggccgaggcatactctcggagccagctggaggagcaggccgcccgctcggccgagtatgggagcagcctccagagcagccgcagcgagatcgcggatctcaatgtgcgcatccagaagctgcggtcccagatcctctctgtcaagagccattgcctgaaactggaggagaacatcaagacagctgaggagcagggtgagctggccttccaggatgccaagaccaagctggcccagctggaggccgccctgcagcaggccaagcaggacatggcgcggcagctgcgcaagtaccaggagctgatgaacgtcaagctggccctggacatcgagatcgccacctacaggaagctggtggagggcgaggagggcaggatggactcgccctcagccactgtggtcagcgctgtgcagtccaggtgcaaaaccgccccttccctcccctaccccttatgttccctgtagctgcctccagatcaggcctctccaaggccccctcccgaaagaagaagggcagcaaaggccccgtgatcaaaatcaccgaaatgtcagagaagtacttctcgcaggagtcggaggtctcagagtaaggcggctggaccccaggaaccccagggcactccactgcagcaggagggacttaagctagactcaagaaagcagcttggagcctctaggttgagaagagaggcaaaacctgatattgaactgagagaggggttcaaaactgactgtgttttgtgggctgccagggtgggagaggagcatcaccagctcctcagagccactccgctccatatcagtatctcacagtcccatccttccaaccttctggccagaggttttcctgatgggtgagtcggaattaggggtcagttttgtctccacctcctcgctcctctgaggctcctcctccagcatcaggctctgccaaggcccctctgactcttgcccaatccttgaccttgactcctatctcaagccttgccttgtctctgcctcggaactgggactgggactggctcatccacctatgtgcgggagccgaggaggacggcgtgggccctgtcctgtatctggaattcctgggaaggctggctgctgaagaccctcttggctttcccgtgctctttgggctccccagagacctgacagtattagggagtgaagggaggaggggccctggctatttgggacctaagcctaggccccagagatcagcccgaacacccgcatcccttcctcctcccatgggtccctcccagtaggcagtagtcagaactggatgggctgcccccagccagctcccagcagcttctccggaagctgctcttgccataatcaactccctgggagtggaagccagatggcagcttgagattgggcaggagcattcgatcttcctttcacctccctgccatgctggggtcctacccagcctggatctgagctctgtgcccccagccgggttgttcccagcctgagcaccgggctttggtgcaccaggccttggagacccctggtcccacccctgccgtgaagccccaggcccacttcccaagaatctcacttctcagggcctctgttctcctctccactgggccaaatagcctggccctcccctccttggcattcatgggggagcccaggaaccccccacacctatggggttagagctcctcctttcttctcactccttccccttcctccctccatgcccactccccctgcctccagcaggccaggaagaaggcacagtccaggcaagtctgggagcttccaagcccttgaggtccagctgtggggcccaaatgacagccttacaagggttctaccagagaggaaaattccacatcccaccagaagacaggggtgttggcaggcatactcctatctcctcctcttggctctcaatgctgaggcttgcagaggcatcccagcggcaccagcctcccactgcacagcttccttccctccttcactctcctctcccctccctgccccttgcctcacctcctcttctagactgcattagattcattcatctcatttgccaggacatgttggccagaggtctgggcccatcccaggcctcaaggccctccaggcctgtggggagcactggagggttactgactctctggccatgggaactcagagattctcatccccaaagtcccaaaagagggtgctgattggtgcttttcctcaggctcttcattggtttccaagggagcaaatcctcagtggggatacaagacatataaagtatatattattttttcataacttatgtggcttttaacttattgcttcccttcctgtttctgcatgatcagtctgtatgtactatctggaaagataacacatactccagccacctcacctgattggctatcttggggccatgtccccttcttgctgccacaggatgaataaagtgttgagatttgtctatggagaaagctgtgtgtctgtttttatctcccctctcaggaccagtcagccactggtcaatcaggctgatcatggaacattaggaattctccaattaagggagaaaaagtccagggacttagttatatcttcagaccagtgcagctggtacacacaaagttctcctgtctcaccatctgatatggtttggatgctcgtcccctccaaatctcatgttgaaatgtaattcccagtgttggaagtggagcctggtgggaagtatttggatcatgagagaggatccttcatgaatggctcagcaccatctccttggtgatgagtgagttctcactcaattcacatagatatggttgtttaaaagagtctgagacctctcccctctttctcgccatgtgatatgcctgctcccccttcaccttccgcctttactgtaagcttcctgaggccctcaccagaagctgagcaaatgttggtgccatgccagtacagcctgcagaattgtgagccaaaataaatgtcttttctttataaatta

SEQ ID NO: 25 - DNA, 1506 bp, Homo sapiens
agcggatagaggacacgaccaagatggcggcggtgtctggcttggtgcggagaccccttcgggaggtctccgggctgctgaagaggcgctttcactggaccgcgccggctgcgctgcaggtgacagttcgtgatgctataaatcagggtatggatgaggagctggaaagagatgagaaggtatttctgcttggagaagaagttgcccagtatgatggggcatacaaggttagtcgagggctgtggaagaaatatggagacaagaggattattgacactcccatatcagagatgggctttgctggaattgctgtaggtgcagctatggctgggttgcggcccatttgtgaatttatgaccttcaatttctccatgcaagccattgaccaggttataaactcagctgccaagacctactacatgtctggtggccttcagcctgtgcctatagtcttcagagggcccaatggtgcctcagcaggtgtagctgcccagcactcacagtgctttgctgcctggtatgggcactgcccaggcttaaaggtggtcagtccctggaattcagaggatgctaaaggacttattaaatcagccattcgggataacaatccagtggtggtgctagagaatgaattgatgtatggggttccttttgaatttcctccggaagctcagtcaaaagattttctgattcctattggaaaagccaaaatagaaaggcaaggaacacatataactgtggtttcccattcaagacctgtgggccactgcttagaagctgcagcagtgctatctaaagaaggagttgaatgtgaggtgataaatatgcgtaccattagaccaatggacatggaaaccatagaagccagtgtcatgaagacaaatcatcttgtaactgtggaaggaggctggccacagtttggagtaggagctgaaatctgtgccaggatcatggaaggtcctgcgttcaatttcctggatgctcctgctgttcgtgtcactggtgctgatgtccctatgccttatgcaaagattctagaggacaactctatacctcaggtcaaagacatcatatttgcaataaagaaaacattaaatatttagtttggacttgaatatcaagtcgttgaaatttatttgaaatacttgctggcactgcacctggatttgtactgcaagacctgactattcataacggaaaacgatttctaaagcaacagcaggtatttttgtacagggaagtttaaatgtgtttgtgtatggaaaactctccactctcctcccctagatgccatgcttccttttgtctgttacggttgccatgttctttgaataacaaattatataacattttatcctctctcaccacaaggacaaagtatggatgtggcagagtcctcatgaaagatgtatccaaacaagataacttatatgtataaaattaaagcatataatatacatttactgttagtttgttttgataaggaataaaggaatttctaacatg

SEQ ID NO: 26 - DNA, 2395 bp, Homo sapiens
agagagagctgtggttgccggaagttgagcggcggcaagaaataatggcggcagctacgggggatcctggactctctaaactgcagtttgccccttttagtagtgccttggatgttgggttttggcatgagttgacccagaagaagctgaacgagtatcggctggatgaagctcccaaggacattaagggttattactacaatggtgactctgctgggctgccagctcgcttaacattggagttcagtgcttttgacatgagtgctcccaccccagcccgttgctgcccagctattggaacactgtataacaccaacacactcgagtctttcaagactgcagataagaagctccttttggaacaagcagcaaatgagatatgggaatccataaaatcaggcactgctcttgaaaaccctgtactcctcaacaagttcctcctcttgacatttgcagatctaaagaagtaccacttctactattggttttgctatcctgccctctgtcttccagagagtttacctctcattcaggggccagtgggtttggatcaaaggttttcactaaaacagattgaagcactagagtgtgcatatgataatctttgtcaaacagaaggagtcacagctcttccttacttcttaatcaagtatgatgagaacatggtgctggtttccttgcttaaacactacagtgatttcttccaaggtcaaaggacgaagataacaattggtgtatatgatccctgtaacttagcccagtaccctggatggcctttgaggaattttttggtcctagcagcccacagatggagtagcagtttccagtctgttgaagttgtttgcttccgtgaccgtaccatgcagggggcgagagacgttgcccacagcatcatcttcgaagtgaagcttccagaaatggcatttagcccagattgtcctaaagcagttggatgggaaaagaaccagaaaggaggcatgggaccaaggatggtgaacctcagtgaatgtatggaccctaaaaggttagctgagtcatcagtggatctaaatctcaaactgatgtgttggagattggttcctactttagacttggacaaggttgtgtctgtcaaatgtctgctgcttggagccggcaccttgggttgcaatgtagctaggacgttgatgggttggggcgtgagacacatcacatttgtggacaatgccaagatctcctactccaatcctgtgaggcagcctctctatgagtttgaagattgcctagggggtggtaagcccaaggctctggcagcagcggaccggctccagaaaatattccccggtgtgaatgccagaggattcaacatgagcatacctatgcctgggcatccagtgaacttctccagtgtcactctggagcaagcccgcagagatgtggagcaactggagcagctcatcgaaagccatgatgtcgtcttcctattgatggacaccagggagagccggtggcttcctgccgtcattgctgcaagcaagagaaagctggtcatcaatgctgctttgggatttgacacatttgttgtcatgagacatggtctgaagaaaccaaagcagcaaggagctggggacttgtgtccaaaccaccctgtggcatctgctgacctcctgggctcatcgctttttgccaacatccctggttacaagcttggctgctacttctgcaatgatgtggtggccccaggagattcaaccagagaccggaccttggaccagcagtgcactgtgagtcgtccaggactggccgtgattgcaggagccctggccgtggaattgatggtatctgttttgcagcatccagaagggggctatgccattgccagcagcagtgacgatcggatgaatgagcctccaacctctcttgggcttgtgcctcaccagatccggggatttctttcacggtttgataatgtccttcccgtcagcctggcatttgacaaatgtacagcttgttcttccaaagttcttgatcaatatgaacgagaaggatttaacttcctagccaaggtgtttaattcttcacattccttcttagaagacttgactggtcttacattgctgcatcaagaaacccaagctgctgagatctgggacatgagcgatgatgagaccatctgagatggccccgctgtggggctgacttctccccggccgcctgctgaggagctctccatcgccagagcaggactgctgaccccaggcctggtgattctgggcccctcctccataccccgaggtctgggattcccccctctgctgcccaggagtggccagtgttcggcgttgctcgggattcaagataccaccagttcagagctaaataataaccttggccttggccttgctattgacctggg

SEQ ID NO: 27 - DNA, 902 bp, Homo sapiens
gatttactgaacatggctgctgaaatgtataacattattgtgcattattgctaccgtgatatgcggatttatattgcaattgcctctggattcagaaaaacacccttcacagtgaggtgaccaagatggagttttctggaagaaagtggaggaagctgaggttggcaggtgaccagaggaatgcttcctaccctcattgccttcagttttacttgcagccaccttctgaaaacatatctttaatagaatttgaaaacttggctattgatagagttaaattgttaaaatcagttgaaaatcttggagtgagctatgtgaaaggaactgaacaataccagagtaagttggagagtgagcttcggaagctcaagttttcctacagagaaaacttagaagatgaatatgaaccacgaagaagagatcatatttctcattttattttgcggcttgcttattgccagtctgaagaacttagacgctggttcattcaacaagaaatggatctccttcgatttagatttagtattttacccaaggataaaattcaggatttcttaaaggatagccaattgcagtttgaggctgtaagtatatttttgtagttatttctaattgttctcaccattcatttttcccttctgtcttaagtgctggtactaatgtgtagtgtgttctctttacattctccaagtacctgcctgaaacagtagctaatagctttggataacaatatatctttccttctctatgactagaagaaaaggactccttaataacaaagtctcacacttacttgctctgttaaatgtgtgctttattaaagcacaagaaggtttagtttataaaggttcatctttaaccaaaattttgtcggccaaaataaagctaataatgtgttaaac

SEQ ID NO: 28 - DNA, 3859 bp, Homo sapiens
ggagcccggcggcggcttccggtcgggggaaaaaagttgggccgaaggaggggccgggaagacgcaagaggaagaagagaaaacggccgggcggcggtggctgtaggttgtgcggctgcagcggctcttccctgggcggacgatggacagccagggcaggaaggtggtggtgtgcgacaacggcaccgggtttgtgaagtgtggatatgcaggctctaactttccagaacacatcttcccagctttggttggaagacctattatcagatcaaccaccaaagtgggaaacattgaaatcaagataaataagaaaaaggatcttatggttggtgatgaggcaagtgaattacgatcaatgttagaagttaactaccctatggaaaatggcatagtacgaaattgggatgacatgaaacacctgtgggactacacatttggaccagagaaacttaatatagataccagaaattgtaaaatcttactcacagaacctcctatgaacccaaccaaaaacagagagaagattgtagaggtaatgtttgaaacttaccagttttccggtgtatatgtagccatccaggcagttctgactttgtacgctcaaggtttattgactggtgtagtggtagactctggagatggtgtgactcacatttgcccagtatatgaaggcttttctctccctcatcttaccaggagactggatattgctgggagggatataactagatatcttatcaagctacttctgttgcgaggatacgccttcaaccactctgctgattttgaaacggttcgcatgattaaagaaaaactgtgttacgtgggatataatattgagcaagagcagaaactggccttagaaaccacagtattagttgaatcttatacactcccagatggacgtatcatcaaagttgggggagagagatttgaagcaccagaagctttatttcagcctcacttgatcaatgttgaaggagttggtgttgctgaattgctttttaacacaattcaggcagctgacattgataccagatctgaattctacaaacacattgtgctttctggagggtctactatgtatcctggcctgccatcacggttggaacgagaacttaaacagctttacttagaacgagttttgaagggtgatgtggaaaaactttctaaatttaagatccgcattgaagacccaccccgcagaaagcacatggtattcctgggtggtgcagttctagcggatatcatgaaagacaaagacaacttttggatgacccgacaagagtaccaagaaaagggtgtccgtgtgctagagaaacttggtgtgactgttcgataaactccaaagcttgttcccgtcatacccgtaatgctttcttttttcctttattgccaatctttgaactcattcaactccaggacatggaagaggcctctctctgccctttgactggaaaggtcaagttttattctggtgtcttggggaagctttgttaaatttttgttaatgtgggtaaatctgagtttaattcaactgcttccctacatagactagagggctaaggattctgtctgctgctttgtttcttctaagtaggcatttagatcattcctataggcttcctattttcactttactgctctaatgctgctagtcgtagtctttagcacactaggtggtatgcctttattagcataaaacaaaaaaaactttaacaggagcttttacatattactgggatggggggtggttcgggatgggtgggcagctgctgaaccctttagggcatttcctctgtaatgtggcgctttcaactgtactgctgcagctttaagtaccttaaagcttctcctgtgaacttcttagggaaatgttaggttcagaactaaagtgttttgggtgggttttgttgcgggggggagggtaacaatgggtggtcttctgatttttatttttgaggttttgtcaactggagtacgtagaggaactttatttacagtactttgatttggcaggttttcttctacttgtgctctgcctggagctgtttccatatgatataaaaagcaagtgtagtattccattactatgtggcttagggatttatttgttttttaaaatcaaccatgttagctgggattagactccctacagtccttcaatggaaaagtaacatttaaaaatcctttgggtaattcgaattacagatttaaaagagcttaagatctggtgttttgttaatgcttctgtttattccagaagcattaaggtaacccattgccaagtatcattcttgcaaattattcttttatataactgaccagtgcttaataaaacaagcaggtacttacaaataattactggcagtaggttataattggtggtttaaaaataacattggaatacaggacttgttgccaattgggtaattttcattagttgttttgtttgttttgatttgaaacctggaaatacagtaaaatttgactgtttaaaatgttggccaaaaaaatcaagatttaatttttttatttgtactgaaaaactaatcataactgttaattctcagccatctttgaagcttgaaagaagagtctttggtattttgtaaacgttagcagactttcctgccagtgtcagaaaatcctatttatgaatcctgtcggtattccttggtatctgaaaaaaataccaaatagtaccatacatgagttatttctaagtttgaaaaataaaaagaaattgcatcacactaattacaaaatacaagttctggaaaaaatatttttcttcattttaaaacttttttttaactaataatagctttgaaagaagaggcttaatttgggggtggtaactaaaatcaaaagaaatgattgacttgagggtctctgtttggtaagaatacatcattagcttaaataagcagcagaaggttagttttaattatgtagcttctgttaatattaagtgttttttgtctgttttacctcaatttgaacagataagtttgcctgcatgctggacatgcctcagaaccctgaatagcccgtactagatcttgggaacatggatcttagagtcactttggaataagttcttatataaatacccccagccttttgagaacggggcttgttaaaggacgcgtatgtagggcccgtacctactggcagttgggttcagggaaatgggattgacttggccttcaggctcctttggtcataattttaaaatatgggagtagaaaacaacaaagaatggaatggactcttaaaacaatgaaagagcatttatcgtttgtcccttgaatgtagaatttgtttttgatttcataattctgctggtaaatgtgacagttaaaatggtgcattatgtatatatattataatttagaaataccattttataattttactattccagggtgacataatgcatttaaatttgggatttgggtggagtattatgtttaactggagttgtcaagtatgagtccctcaggaaaaaaaaaaaattctgttttaaaaagcaatctgattcttagctcttgaaactattgctacttaaatttccaataattaaaaatttaaaatttttaaattagaattgccaatacttctacatttgagaagggtttttttagaaatacatttagtaaagtccccaagacattagtcttacatttaaacttttttctttaaaacatggttttggtggttaacttttacacagttctgagtactgttaatatctggaaagtatcttgagatatcagtggaaagctaaacagtctaaattaacatgaaatacttcattttgattgagaaaataaaatcagattttttcaaagtc

SEQ ID NO: 29 - DNA, 2765 bp, Homo sapiens
taaaagctgcttcctgttggggcatgagtccggcgcgtgtcgggttttgagctgccgcggtcccgggactgagctccttgggagcagacagctgtcctcactggcagaggaggagcgctcagtaaatgctcgctggacgaataaatggctagataagataaggcagctccagcccctggaaggccagagacttgccagtgtcccactagcgggctcttcgcaagaatccccccgggcccgccgcagccaggcggcggccggcagagggcgctgctcgggcatggcggaggagcggccgggggcctggttcggcttcggtttctgcggcttcgggcaggagctgggctccggacgcgggcgccaggtgcacagccccagtccgctgcgggcgggcgtcgacatctgccgcgtgagcgcgagctggagctacaccgctttcgtgacccgtggaggccgcttggagctgtcgggctcagccagcggcgcggcgggccgctgcaaggacgcgtgggcctcggaggggctcctcgcggtgctgcgcgccgggccggggccggaggcgttactgcaggtctgggcggccgaatcggcgctgcgtggggagccattgtgggcccagaatgtggtgcccgaggccgaaggggaagacgatccggccggtgaggcccaggctgggaggctacccctgctgccctgcgcccgtgcctacgtgagcccgcgggcgcccttctaccggcctctggctccggagctgcgggcacgccagctggagctgggcgccgagcacgcgttgctgctggacgctgctggccaggtgttctcctggggcgggggcaggcatggacagctgggccatgggaccctggaggcagagctggagccacggctgttggaggcgttgcagggcctagtcatggctgaggtggccgcggggggctggcattctgtgtgtgtgagtgagactggggatatttatatctggggctggaatgaatcagggcagctggccctgcccaccaggaacctggcagaggatggagagactgtcgcaagggaagccacagaactgaatgaagatggttctcaggtgaagagaacgggtggggctgaggatggagcccctgcccccttcatagctgtccagcccttcccggcattactggatctccccatgggctcagatgcagtcaaggccagctgtggatcccggcacacagctgtggtgacacgaacaggggagctctacacctggggctggggtaaatatggacagctgggccacgaggacaccaccagcttggatcggcctcgccgtgtggaatactttgtagataagcaactccaagtaaaggctgtcacctgtgggccgtggaacacctacgtgtatgctgtggagaaagggaagagctgacatgtgtacgtatatgtatatgcaacacctgtgagacccccattcaggtcaaggaaaaccattgcctgcaccccaagggccccatatttgcccctccccatcacagtcctgcccttcaccctcaagcacggtcctaaacttgtctgcactttagaaacacctggagagcattgaaaactctgctgcctaaggtcagcatcaatcaaaacaatgaaatcaatgaaacaatgaaaccagagcttctaggtgtgtggcctggatagtggtagattcaaagctccacccacctcatcccaggtacatttgatgtgcagctgagattggggcacattccaggtcatcgtcttctgtcagtcatttccctgctttcgtttgaattttaccattcttgtatgcagccttatacgacatagttgtgtttgcttttgagtgttagataaatggaatcctgtgtatgtgcttttgtgtcgtttttgtcactcagcattgtataatccatccttgttgggtcctggagttcatttttaatgctatatggtgttctgttgtatgaataatacctcaagtgatacagccttgttgatggtcatttttattgtttctgattttggtcattccacataattctttgtgcagtcttctgcacatgtgcacaagttcctttgcagaacattgagttgaattgctaagtcaggagatacctttaattttactagataactgttgcccccagcagggtggggtctactgtggctaaaatgtcaggtagatgcacactggttttaattggcatttccctggatactgatgaggttgagtagcttttcatttgttttggatggctgggcatggtggctcacacctgtagtcccagcactttgggaggctaagcagggagattgcttgaggcgaagagttcatatgtttattggccacttggagtttttctgttgtcaagtgcctgttcaagttttctggccttttaaaatgttctgtattttccttagtgatttttcttttggatatttcagatacaagtcttttgagagttagtattcagagtatcttctgctacaatgtagtttgtttcagtctctcttggtattaccaattttaatacttaggtgatgcttactccatgccaggtaaggctcaaagtgctttacaagtatcaacttattttgataaaataagcttatcagtagttttctttatagttaaattctatttgtgcatgtgtgtgtctgtggtttagcaaatgtttcccacccatggggtcttttttattgtggtaaaatatactgaacataaaatttatgttcaataaaaaacaaaaattgtttttaaccatttt

SEQ ID NO: 30 - DNA, 3766 bp, Homo sapiens
cccgcgcatgcgtcctccggttggcggcggctgcggcggtggcggctacgagcggctccgtttttttaaagggaaacgctgaggcgccgagggcagatggaagagtatgaggaagagccctctcgggggtggtggcggctcgggagcctccagtcaggccgcctgcctcaaacagatccttctgctgcaattggacctcatcgaacagcagcagcagcagctgcaggccaaggaaaaggagatcgaggagctgaagtcagagagagacacgctccttgctcggattgaacgtatggaaaggcggatgcagctggtaaagaaggataacgagaaagaaaggcacaagctgtttcagggctatgaaactgaagagagagaggaaacagagctatctgagaaaattaaactggagtgccagccggagctttccgagacatcccagactctgcctcccaagcccttctcatgtgggcggagtggaaagggacataaaaggaaatccccatttggaagtacagaaagaaagactcctgttaaaaagctggctcctgaattttcaaaagtcaaaacaaaaactcctaagcactctcctattaaagaggaaccctgtggttccttatctgaaactgtttgtaaacgtgaattgaggagccaagaaaccccagaaaagccccggtcttcagtggacaccccaccaagactctccactccccaaaagggacccagcacccatcccaaggagaaagccttctcaagtgagatagaagatttgccgtacctttccaccacagaaatgtatttgtgtcgttggcaccagcctcccccatcaccgttaccattacgggaatcctctccaaagaaggaggagactgtagcaaggtgtctgatgccatcaagtgttgcaggagaaacttcagtcttggctgttccttcttggagggaccactcagtagagcctctaagggacccaaatccttcagaccttttggagaacctggatgacagtgtgttttcgaagcggcatgcaaaactggagctggatgagaagagaaggaaaagatgggatattcagaggatcagggaacaaagaattttacagcgactgcagctcagaatgtataaaaagaaaggaattcaggaatctgagcctgaggttacctcatttttccctgagccagatgatgttgaaagtttgatgattacccccttcttgcctgttgtagcatttggacgaccattaccaaaattaactccacagaattttgagctaccctggttggatgagcgtagccgatgcagattggagatccagaagaagcaaacacctcaccggacgtgtaggaaatagctgtgctggcaagaaccctgtcttcagatagttgtagcatgccattcccgagagtggcagagacctgtatatgtgacctttgtcctcacatatgttatcactcgctgataataccctttcatacttccttgactttgttttcattactctgatttcacaaaaactctttcattcggctaattgtgagttatggagggtgattgggatttcttttcccttttttgggaaatgggctctcaagctaaagctataggatggcagattcagaagtttcaggggtctgtttctatacatttgcctatgttaaaggggtaaaagggctctcttcattagacatgtggaagatgaagcagccccttcctttagagctgtgcctgcatggcactcttctcaccctggtacaccctccttatagtgggtatagtgatttttaaccctaaaataaaacaaacaacctcaccatgagctttaggaccagaagaggaatgacaagtgaagcgatgaagcaagccatcttcacagagtagaaaagacatcggagagttggtagataactgtctgaaaagatagttgttcatttgaaactattctgtgatacagtcatgtgggaagggatgtttggctgtgattattttttcagttaatggataacaatttctttactgctcaaaaaccaaaatctttggaaaagaaagtggggatggttagtttcagaacaagttacagctgtaaacaaaagcacttagtatttgggatggcatgccaaaacctgtataaatgtccttgtatcacatcacttctcaagtattccttcattgggcttcatccttttagcagaactcttggtggtgggatagagacttagggagggtagggggagagtgtggaaataggtgcttcctttggctggcaaatgtctacatcttgaaacaaacagatgtacctaatgagcttctccattcactttgtaaaaataatttgtatgtgtaccatcttggtcctctcccctcccgttttgttaaaatatcaggatagcactcccaggccactttggtctcagtgtaagatccctattaactatctgaaaggaaaatagagccaagacctctggtctcaaatatataggaattgcctttctttagtcttcaggactattgtgtgaaaacaagtaggggtctaatctcctagaaggtaggggcttttatccttaaagagaatatgtccccagattattagcacttttagaggagaagccaaggtatgtagggtgtgtggctggcccatcagtggagcacgaagagagaatgggataccattgtgggaagagaagaaaagttcctcaggggcctcccactgctaaagttttttgtgagatgttgatctgtgcttcctggatttgacttttaaaggaattattctggcagcacatgtagtattcttggatgatcttgctgctcttatttctccttttgtgtgtgtgtgtgtgtgtgtgtggctatgggttttcatttgtaactccatctgcttaggagagtgggctctctataagggaacctgctgtaaacttcattgcagcaaggatgtagagagaaataggacttaattccactaggggctctcatctcacaccttaaggaggagatttctagaaaaactgggccagattttctttgttctccatcattttaatgtggcaggctgttcagttttcttactcttacctatgtgatatttcttcgtaacgtgtccaaaaagaaaaaagacccaatcagtgtctcttgactttgttctttgatccctcagtttcttcttgatttcagcatgtgtcgggttcctaattttgggtatgagttagcaaatttaaccattgtgtttgtgccctacccaggggactccccagtttctgacttgaagtagactgagaagaatccacgaggtgctatctggccagatttaagtagattctatttccttggttctccctctccctgaggacctcttattttattgtcccctcttctaggttaattctcctttgatttgactttgttgagaaggaggttggacagtagattagcaaagttccaagtgcaaaattacagtgtgttagagtgtggggggaaaattagtcttatttttccctacatgggatacaacactgtgaattcaatcttcaactgaaggccctgcagttctcctaaaacatagttgtttgtttttctttaacaaagtttaagctagtgttaataaattaaaaaaaattgcttgtctgtctacttcagctttgttttatgcccatttcatattgttgtctgtgttgtaattcataacttttgataccatttctgatgtgtaaaattggttgtcttgtaaatatcttataaagagttcaattgtaaataaactattgtggctgtt

SEQ ID NO: 31 - DNA, 4199 bp, Homo sapiens
cgataacgatttgtgttgtgagaggcgcaagctgcgatttctgctgaacttggaggcatttctacgacttttctctcagctgaggcttttcctccgaccctgatgctcttcaattcggtgctccgccagccccagcttggcgtcctgagaaatggatggtcttcacaataccctcttcaatcccttctgactggttatcagtgcagtggtaatgatgaacacacttcttatggagaaacaggagtcccagttcctccttttggatgtaccttctcttctgctcccaatatggaacatgtactagcagttgccaatgaagaaggctttgttcgattgtataacacagaatcacaaagtttcagaaagaagtgcttcaaagaatggatggctcactggaatgccgtctttgacctggcctgggttcctggtgaacttaaacttgttacagcagcaggtgatcaaacagccaaattttgggacgtaaaagctggtgagctgattggaacatgcaaaggtcatcaatgcagcctcaagtcagttgccttttctaagtttgagaaagctgtattctgtacgggtggaagagatggcaacattatggtctgggataccaggtgcaacaaaaaagatgggttttataggcaagtgaatcaaatcagtggagctcacaatacctcagacaagcaaaccccttcaaaacccaagaagaaacagaattcaaaaggacttgctccttctgtggatttccagcaaagtgttactgtggtcctctttcaagacgagaataccttagtctcagcaggagctgtggatgggataatcaaagtatgggatttacgtaagaattatactgcttatcgacaagaacccatagcatccaagtctttcctgtacccaggtagcagcactcgaaaacttggatattcaagtctgattttggattccactggctctactttatttgctaattgcacagacgataacatctacatgtttaatatgactgggttgaagacttctccagtggctattttcaatggacaccagaactctaccttttatgtaaaatccagccttagtccagatgaccagtttttagtcagtggctcaagtgatgaagctgcctacatatggaaggtctccacaccctggcaacctcctactgtgctcctgggtcattctcaagaggtcacgtctgtgtgctggtgtccatctgacttcacaaagattgctacctgttctgatgacaatacactaaaaatctggcgcttgaatagaggcttagaggagaaaccaggaggtgataaactttccacggtgggttgggcctctcagaagaaaaaagagtcaagacctggcctagtaacagtaacgagtagccagagtactcctgccaaagcccccagggcaaagtgcaatccatccaattcttccccgtcatccgcagcttgtgccccaagctgtgctggagacctccctcttccttcaaatactcctacgttctctattaaaacctctcctgccaaggcccggtctcccatcaacagaagaggctctgtctcctccgtctctcccaagccaccttcatctttcaagatgtcgattagaaactgggtgacccgaacaccttcctcatcaccacccatcactccacctgcttcggagaccaagatcatgtctccgagaaaagcccttattcctgtgagccagaagtcatcccaagcagaggcttgctctgagtctagaaatagagtaaagaggaggctagactcaagctgtctggagagtgtgaaacaaaagtgtgtgaagagttgtaactgtgtgactgagcttgatggccaagttgaaaatcttcatttggatctgtgctgccttgctggtaaccaggaagaccttagtaaggactctctaggtcctaccaaatcaagcaaaattgaaggagctggtaccagtatctcagagcctccgtctcctatcagtccgtatgcttcagaaagctgtggaacgctacctcttcctttgagaccttgtggagaagggtctgaaatggtaggcaaagagaatagttccccagagaataaaaactggttgttggccatggcagccaaacggaaggctgagaatccatctccacgaagtccgtcatcccagacacccaattccaggagacagagcggaaagaaattgccaagcccggtcaccatcacgcccagctccatgaggaaaatctgcacatacttccatagaaagtcccaggaggacttctgtggtcctgaacactcaacagaattatagattctaatctgagtgagttactgagctttggtccactaaaacaagctgagctttggtccactaaaacaagatgaaaaatacaagagtgactctataactctggtctttaagaaagctgccttttcatttttagacaaaatcttttcaacgctgaaatgtacctaatctggttctactaccataatgtatatgcagcttcccgaggatgaatgctgtgtttaaatttcataaagtaaatttgtcactctagcattttgaatgaatagtcttcactttttaaattattcatcttctctataataatgacatcccagttcatggaggcaaaaaacaagtttcttgttatcctgaaactttctatgctcagtggaaagtatctgccagccacagcatgaggcctgtgaaggctgactgagaaatcctctgctgaagacccctggttctgttctgcctccaacatgtataattttatttgaaatacataatcttttcactatgcttttgtggggttttttttaagtatgtgtaaaaatgtgatgctcagataagtacatttatatcagttcagtgttaaaatgcagtctcttgagttaaagtcatctttattttaaatgcagtgataaatgtcaactcttcggagaaactaggagaacaacaacagaaagctgtgtttgtcttttttctctcaaatatatctcccgtatgagatttcaggtccccatgttttcaccaagcaatctgctatgtcagccaacccaacatcactttctacaggaggttatgatttttgccatttactagaggaagatgttttatgaaatcaatttggggtttgaattcaggtgcagtcatcagttctttaggggctgcaatgttttaaaaaaaataagtcatcagattttaagaaaaaagtgatgatttcttattgatatttttgtaacagaatatagctcttaactgaaaatccagaaccagaaacataaatcttgagtttcttttcatgtacataaaaagcaatagccttttagtatagatagccctgagccaaaaagtaatagaattttctctagatatttaatacagagagtgtatagactgactctaagttaataatgtgcaaaatatcttaaacatccctccccttattcaacaattatgtatcagtgatcttgaaccattgttttatatttttcacctttgtaacctcatggaaagaggctttacatactttctatgtactatttacttagaagggagcccccttccagtcatgaaacttcatttgttttatccatatccctgaggactgtgtagactttatgtcagtttttgtcattatttgaaaatctattctgacaactttttaattcctttgatcttataagttaaagctgtaacaactgaaattgcatggatcaagtaagcatagttttatccagggagaaaaataaaaggaagccatagaattgctctggtcaaaaccaagcacaccatagccttaactgaatatttaggaaatctgcctaatctgcttatatttggtgtttgttttttgactgttgggctttgggaagatgttatttatgaccaatatctgccagtaacgctgtttatctcacttgctttgaaagccaatgggggaaaaaaatccatgaaaaaaaaaagattgataaagtagatgattttgtttgtatccctacccatctcctggcagccctactgagtgaaattgggatacatttggctgtcagaaattataccgagtctactgggtataacatgtctcacttggaaagctagtacttttaaatgggtgccaaaggtcaactgtaatgagataattatccctgcctgtgtccatgtcagactttgagctgatcctgaataataaagccttttacctt

SEQ ID NO: 32 - DNA, 3187 bp, Homo sapiens
atggcggcggcggcggcggccgccaccacggccgcctgcagcagcggcagcgccggcaccgacgccgcgggcgccagcggattgcagcagccgccgccgcagccccagcctcagcccgcggccgccgcgccggcccagccgccgcccgaacccccccggaagccgcgcatggacccgcggcgccgccaggctgccctctccttcctcaccaacatctcgctggacggccggctgccgccgcaggacgcggagtggggcggtggcgaggagggcggcgcggccaagccgggcgccggcggcgcctgcggcgcgaggactcggttcagcttgctcgccgctgccgagcggggcggctgcatcgcgctcgccgcgccgggcacgccggctgcggggttagccgctgggtccggcccctgcctcccacagccctcgtcgctgccgcccttgattcctggcggccatgcgaccgtgtccggccccggggtggcgcgggggttcgcgagtcccctgggcgccggccgggcgtcgggggagcagtggcagccgccccggccggcgcctctcgccgcctgtgcccaactgcagctgctcgacgggtccggggccgccgggcaggaggagttggaggaggacgatgcctttatcagcgtgcaggtgccggcggccgcctttttgggctccgggacccccgggagtgggagcggcagtcggggacgcctcaactcgttcactcagggaatcctgcccatcgccttctccaggccgacttcgcagaactactgctccctggagcagccaggccagggcggcagcaccagcgccttcgagcagctgcagaggtcccgacggcgcctcatctcccagagatcttccttggagaccctggaagatattgaggagaacgcccctctccggagatgtcgaactctctcaggttcacccagaccaaagaattttaagaagattcattttatcaagaacatgcggcaacacgataccaggaatggcagaatagtccttatcagtggcagaagatccttctgtagtatattttcagtgctgccgtatcgcgacagtacccaagtcggggacttgaagttggacggaggaagacaatcaactggtgcagtgagtttgaaagagatcattggtctggaaggtgtggagctgggtgctgatgggaagactgtttcctatacccaatttctgttacccacaaatgcctttggagcccggagaaataccatagactccacctcctctttctcccagttccgtaacctgagccaccgcagcctctccataggccgggcaagcggcacccaggggagcctcgacacaggtagtgacctgggagactttatggactatgacccaaatctcttggatgacccccagtggccttgtggcaaacacaaacgcgttctgatcttcccttcctacatgacaacagtgattgactacgtgaagccctcggatctcaagaaggacatgaacgagaccttcaaggagaagtttcctcacattaagctgacactcagcaaaattaggagtctgaaacgagagatgcggaagcttgcgcaggaggactgtggccttgaggagcccacggtggccatggccttcgtctactttgaaaagctcgccctcaaggggaaactcaacaaacagaaccggaagctgtgtgctggggcatgtgtgctgttagcagccaaaattggaagtgacctcaaaaaacacgaagtcaagcatttaattgacaaactggaagagaagttccggctgaacaggcgagaactgattgcctttgaattcccggtgttagtggccttggaattcgccctccacttgcccgagcacgaagtcatgccccactacagacggctggtccagagttcctagcactggccccgaggacagccaagggccatttcttctcagcttggtggagcagcacttacttactactggaaatgaaaaaaagtagaactcagaataccagacttttcttcctctcgacatagtttggggagaagcagtactagaaactttccaaggagtcttgggtgtgtagccaagaggagccatgagctatggactcctcaagcacgggaagaggaggtgtgtgctgagaacagagaggccctgccctctgtccactagcgagaatccctagctgccccagcccagtctttctccccggcattcacaaactttgcaagcgtggtccagggccttctccagatctgttccaacttggagtgtgaagggcttgagcatacgggggaagagagtctgcagaagttgggggaaaacttttaaaagataccctcattgtgtcaaagagtgtgccaatctatttttgtatcagcattggaagtgcactttcccctggggcgtgtgggtgtgtgaatgtgcaagtgtctgagagatactgcatcagccctagacccccagagccagtcccgccctttacagagcagcccttagcctggggccatgggtcaggctgaccttcaacaattatttctagatgatttctggataagaattgctctctcggtaccagacagtttgacatcctccacccttagaaaatgactgacattgttttgttactgctcctacccaccaaggggataaagaaggcgagttctgagtgttggatgagtcagtcgcgtggaaggacgtggagcgtggcgctctgtaacttcctgccgtctgccaccccgccacgtgtatttaaccctcgcactttctccactgtggagatggctggggcggcgccccacagtgtgtattcctgtcctctatgttagagtgcatcagaagcacatttactgtgctatctatatcgctatataaaagtgttttataaaaacccagaataggagcacgacgcatgattggtgtttgaggcgtttgccagctgggacaaactgcgtttggagctgtggttaagctgactaaggaggcggtggctctttcttaacattcccacgtgcccagggctgttcatgcaagattttaatggtgacttgtcctggcttactgggacagtctgtatgaggcatgtcaccacactgtcgcctcatagctgcaagagagaggcaccagctgaagttcccctgactgaagagagcctgtggccatgtaaaaagagaattaaactcttgttgctttttgt

SEQ ID NO: 33 - DNA, 546 bp, Homo sapiens
atggaagccatgaatgttgagaaagcctcagcagatgggaacttgccagaggtgatctctaacatcaaggagactctgaagatagtgtccaggacaccagttaacatcactatggcaggggactctggcaatgggatgtccaccttcatcagtgcccttcgaaacacaggacatgagggtaaggcctcacctcctactgagctggtaaaagctacccaaagatgtgcctcctatttctcttcccacttttcaaatgtggtgttgtgggacctgcctggcacagggtctgccaccacaaccctggagaactacctgatggaaatgcagttcaaccggtatgacttcatcatggttgcatctgcacaattcagcatgaatcatgtgatgcttgccaaaaccgctgaggacatgggaaagaagttctacattgtctggaccaagctagacatggacctcagcacaggtgccctcccagaagtgcagctactgcagatcagagaaaatgtcctggaaaatctccagaaggagcgggtatgtgaatactaa

SEQ ID NO: 34 - DNA, 2476 bp, Homo sapiens
tcgcttggtggctccgtctgtctgtccgtccgcccgcgggtgccatcatggcggacgcggccagtcaggtgctcctgggctccggtctcaccatcctgtcccagccgctcatgtacgtgaaagtgctcatccaggtgggatatgagcctcttcctccaacaataggacgaaatatttttgggcggcaagtgtgtcagcttcctggtctctttagttatgctcagcacattgccagtatcgatgggaggcgcgggttgttcacaggcttaactccaagactgtgttcgggagtccttggaactgtggtccatggtaaagttttacagcattaccaggagagtgacaagggtgaggagttaggacctggaaatgtacagaaagaagtctcatcttcctttgaccacgttatcaaggagacaactcgagagatgatcgctcgttctgctgctaccctcatcacacatcccttccatgtgatcactctgagatctatggtacagttcattggcagagaatccaagtactgtggactttgtgattccataataaccatctatcgggaagagggcattctaggatttttcgcgggtcttgttcctcgccttctaggtgacatcctttctttgtggctgtgtaactcactggcctacctcgtcaatacctatgcactggacagtggggtttctaccatgaatgaaatgaagagttattctcaagctgtcacaggattttttgcgagtatgttgacctatccctttgtgcttgtctccaatcttatggctgtcaacaactgtggtcttgctggtggatgccctccttactccccaatatatacgtcttggatagactgttggtgcatgctacaaaaagaggggaatatgagccgaggaaatagcttatttttccggaaggtcccctttgggaagacttattgttgtgacctgaaaatgttaatttgaagatgtggggcagggacagtgacatttctgtagtcccagatgcacagaattatgggagagaatgttgatttctatacagtgtggcgcgcttttttaataatcatttaatcttgggaaaattcaggtgtttggtgtctgccttttttgttcttttttccagcacaacataacttaccactgatactccccctttagttattctgaattaggatatttttgctccaaattcttattttacttaaccagaagggaaaaaaagttgtattttcctgaagctacaggcactttgtcatgtgatttttgagtctcaatttaaggctttgtaaaatgaagagtagaattccaagaaaaatgagaaataattttgtaaaacttaacaaaatcactaaattaaactatatgggaggttatgaattactttttcttgggtagaccctaaaatgtcagtagcatgcaccagaatctgactcccattatgcttctaagcacatttcattgaccttgtctctcatacttcaagaaaaggacagtacattgctacattaccctagaaagtctgtgtgaggatctgccccttcagtctgttattgcaaagtaataaaatgtcacctacagggagcctctgagcctactctagttcaagaggctacctgaaaaaaaataaataagataaagggtcagcaacaacaaagaaaaagacaattacagaaaataagcaagatttggaaaggaagtataatggcacttttttcctcaaaggaagttcttgttttcacataaaatatgaaaagcagatcctgcaggagtaacccccttctttaagagccaagtatttgccagtgcttaaattacaccatacagttctaattatatataatcttttgttcttcagttttttgttttgtttcctttttgttattgttgccgaaggtgagtagttttgcatttctgatgacagccttggaaagtatatttgtaactccatgtctggtaatgccaacccaagtcgacatgggtcttaggacactgaccacctcacatgccataccctcagttaagcatgttaacatttataggaggaaaaaaatcactttgggagaaaataaaattcaactcaagcataaagcttctgtttactcaggccttctaaaaagcaggttaaaatgctctaaaatgagaaagcctgtggtttcacttatttatataactcactgggacattgccaaatgagtaagcacttaattcgctgcttctgagacttctctgtcaaaacagccccactgataatattagacagaacgagaatgcaggggtctcttccctcccctggggtttaggaagctcatgaggagctcggcttaaaatgtctttgatgtctcttcctttgtctcaaaaagtaatgtcaattttatatactatttcaatattactatctgcatttgttttaatataaaaatgtttgctgcctacctttttctcccaaaaaatctttaagtaaagatgatctgggaaaatgt

SEQ ID NO: 35 - DNA, 3274 bp, Homo sapiens
cggagggagcgctgggagcgagcaagcgagcgtttggagcccgggccagcagagggggcgcccggtcgctgcctgtaccgctcccgctggtcatctccgccgcgctcgggggccccgggaggagcgagaccgagtcggagagtccgggagccaagccgggcgaaacccaactgcggaggacgcccgccccactcagcctcctcctgcgtccgagccggggagcatcgccgagcgccccacgggccggagagctgggagcacaggtcccggcagccccagggatggtctaggagccggcgtaaggctcgctgctctgctccctgccggggctagccgcctcctgccgatcgcccggggctgcgagctgcggcggcccggggctgctcgccgggcggcgcaggccggagaagttagttgtgcgcgcccttagtgcgcggaaccagccagcgagcgagggagcagcgaggcgccgggaccatgggctgggggagccgctgctgctgcccgggacgtttggacctgctgtgcgtgctggcgctgctcgggggctgcctgctccccgtgtgtcggacgcgcgtctacaccaaccactgggcagtcaaaatcgccgggggcttcccggaggccaaccgtatcgccagcaagtacggattcatcaacataggacagataggggccctgaaggactactaccacttctaccatagcaggacgattaaaaggtcagttatctcgagcagagggacccacagtttcatttcaatggaaccaaaggtggaatggatccaacagcaagtggtaaaaaagcggacaaagagggattatgacttcagtcgtgcccagtctacctatttcaatgatcccaagtggcccagcatgtggtatatgcactgcagtgacaatacacatccctgccagtctgacatgaatatcgaaggagcctggaagagaggctacacgggaaagaacattgtggtcactatcctggatgacggaattgagagaacccatccagatctgatgcaaaactacgatgctctggcaagttgcgacgtgaatgggaatgacttggacccaatgcctcgttatgatgcaagcaacgagaacaagcatgggactcgctgtgctggagaagtggcagccgctgcaaacaattcgcactgcacagtcggaattgctttcaacgccaagatcggaggagtgcgaatgctggacggagatgtcacggacatggttgaagcaaaatcagttagcttcaacccccagcacgtgcacatttacagcgccagctggggcccggatgatgatggcaagactgtggacggaccagcccccctcacccggcaagcctttgaaaacggcgttagaatggggcggagaggcctcggctctgtgtttgtttgggcatctggaaatggtggaaggagcaaagaccactgctcctgtgatggctacaccaacagcatctacaccatctccatcagcagcactgcagaaagcggaaagaaaccttggtacctggaagagtgttcatccacgctggccacaacctacagcagcggggagtcctacgataagaaaatcatcactacagatctgaggcagcgttgcacggacaaccacactgggacgtcagcctcagcccccatggctgcaggcatcattgcgctggccctggaagccaatccgtttctgacctggagagacgtacagcatgttattgtcaggacttcccgtgcgggacatttgaacgctaatgactggaaaaccaatgctgctggttttaaggtgagccatctttatggatttggactgatggacgcagaagccatggtgatggaggcagagaagtggaccaccgttccccggcagcacgtgtgtgtggagagcacagaccgacaaatcaagacaatccgccctaacagtgcagtgcgctccatctacaaagcttcaggctgctcggataaccccaaccgccatgtcaactacctggagcacgtcgttgtgcgcatcaccatcacccaccccaggagaggagacctggccatctacctgacctcgccctctggaactaggtctcagcttttggccaacaggctatttgatcactccatggaaggattcaaaaactgggagttcatgaccattcattgctggggagaaagagctgctggtgactgggtccttgaagtttatgatactccctctcagctaaggaactttaagactccaggtaaattgaaagaatggtctttggtcctctacggcacctccgtgcagccatattcaccaaccaatgaatttccgaaagtggaacggttccgctatagccgagttgaagaccccacagacgactatggcacagaggattatgcaggtccctgcgaccctgagtgcagtgaggttggctgtgacgggccaggaccagaccactgcaatgactgtttgcactactactacaagctgaaaaacaataccaggatctgtgtctccagctgcccccctggccactaccacgccgacaagaagcgctgcaggaagtgtgcccccaactgtgagtcctgctttgggagccatggtgaccaatgcatgtcctgcaaatatggatactttctgaatgaagaaaccaacagctgtgttactcactgccctgatgggtcatatcaggataccaagaaaaatctttgccggaaatgcagtgaaaactgcaagacatgtactgaattccataactgtacagaatgtagggatgggttaagcctgcagggatcccggtgctctgtctcctgtgaagatggacggtatttcaacggccaggactgccagccctgccaccgcttctgcgccacttgtgctggggcaggagctgatgggtgcattaactgcacagagggctacttcatggaggatgggagatgcgtgcagagctgtagtatcagctattactttgaccactcttcagagaatggatacaaatcctgcaaaaaatgtgatatcagttgtttgacgtgcaatggcccaggattcaagaactgtacaagctgccctagtgggtatctcttagacttaggaatgtgtcaaatgggagccatttgcaaggatgcaacggaagagtcctgggcggaaggaggcttctgtatgcttgtgaaaaagaacaatctgtgccaacggaaggttcttcaacaactttgctgcaaaacatgtacatttcaaggctgagcagccatcttagatttctttgttcctgtagacttatagattattccatattatt

SEQ ID NO: 36 - DNA, 1826 bp, Homo sapiens
cagggcgcgggcgcccgccctgctctgtgacgcgcggcccgaggcgcacgcagggctcacaccacctgtcctggcctccgacccgggccgactatggcggcgctgcggctcctggcgtcagtgctcgggcgcggggtccccgccggcggctcagggctcgcgctgtcccagggctgcgcccgctgctttgccaccagtccccggctccgtgccaagttctacgcggacccggtggagatggtgaaggacatctctgacggggcgaccgtcatgatcgggggcttcgggctctgcgggatccccgagaacctgatcgccgcgctgctcaggacccgcgtgaaagacctgcaggtggtcagcagcaacgtgggcgtggaggacttcggcctgggcctcctgctggccgccaggcaggtccgtcgcatcgtctgttcctacgtgggcgagaacaccctgtgcgagagccagtacctggcaggagagctggagctggagctcacgccccagggcaccctggccgagcgcatccgcgcggggggcgccggggtgcccgccttctacacccccacgggctacgggaccctggtccaggaagggggcgcccccatccgctacaccccggacggccacctggcgctcatgagccagccccgagaggtgagggagttcaacggcgaccacttccttttggagcgcgccatccgggcagacttcgccctggtgaaagggtggaaggccgaccgggcaggaaacgtggtcttcaggagaagcgcccgcaatttcaacgtgcccatgtgcaaagctgcagacgtcacggcggtggaggtggaagagatcgtggaggtgggggctttccccccagaagacatccacgttcctaacatttatgtagatcgcgtgataaaggggcagaaatacgagaaacgaattgagcgcttaacgatcctgaaagaggaagatggagacgctggaaaggaagaggacgccaggacgcgcatcatcagacgcgcagctctggaatttgaggacggcatgtacgccaatctgggcataggcatccccctgctggccagcaacttcatcagtcccagcatgactgtccatcttcacagtgagaacgggatcctgggcctgggcccgtttcccacggaagatgaggtggatgccgacctcatcaatgcaggcaagcagacggtcacggtgcttcccgggggctgcttcttcgccagcgacgactccttcgccatgatccgagggggacacatccaactaaccatgcttggagccatgcaggtttccaaatacggcgacctggcgaactggatgatccctggcaagaaggtgaaaggcatgggcggtgccatggacttggtgtccagtcagaagaccagagtggtggtcaccatgcagcactgcacaaaggacaacacccccaagatcatggagaaatgcaccatgccgctgaccgggaagcggtgcgtggaccgcatcatcaccgagaaggccgtgtttgacgtgcacaggaagaaagagctgacgctgagggagctctgggagggcctgacggtggacgacatcaaaaagagcacggggtgtgcctttgctgtgtccccgaacctcaggcccatgcagcaggtggcaccctgacgggacctggatctgggcggggtggtgcgctcctcagggcgggtgccaccgggttccccaggggaatacatgtccccagctctgggaggggtttgctactggcctcctactttcctccctaggtggacagtgctcctctagagagctgcgactttaattaaaaacaacaggaaaacaga

SEQ ID NO: 37 - DNA, 2016 bp, Homo sapiens
tcgctgcgaaggacatttgggctgtgtgtgcgacgcgggtcggaggggcagtcgggggaaccgcgaagaagccgaggagcccggagccccgcgtgacgctcctctctcagtccaaaagcggcttttggttcggcgcagagagacccgggggtctagcttttcctcgaaaagcgccgccctgcccttggccccgagaacagacaaagagcaccgcagggccgatcacgctgggggcgctgaggccggccatggtcatggaagtgggcaccctggacgctggaggcctgcgggcgctgctgggggagcgagcggcgcaatgcctgctgctggactgccgctccttcttcgctttcaacgccggccacatcgccggctctgtcaacgtgcgcttcagcaccatcgtgcggcgccgggccaagggcgccatgggcctggagcacatcgtgcccaacgccgagctccgcggccgcctgctggccggcgcctaccacgccgtggtgttgctggacgagcgcagcgccgccctggacggcgccaagcgcgacggcaccctggccctggcggccggcgcgctctgccgcgaggcgcgcgccgcgcaagtcttcttcctcaaaggaggatacgaagcgttttcggcttcctgcccggagctgtgcagcaaacagtcgacccccatggggctcagccttcccctgagtactagcgtccctgacagcgcggaatctgggtgcagttcctgcagtaccccactctacgatcagggtggcccggtggaaatcctgccctttctgtacctgggcagtgcgtatcacgcttcccgcaaggacatgctggatgccttgggcatcactgccttgatcaacgtctcagccaattgtcccaaccattttgagggtcactaccagtacaagagcatccctgtggaggacaaccacaaggcagacatcagctcctggttcaacgaggccattgacttcatagactccatcaagaatgctggaggaagggtgtttgtccactgccaggcaggcatttcccggtcagccaccatctgccttgcttaccttatgaggactaatcgagtcaagctggacgaggcctttgagtttgtgaagcagaggcgaagcatcatctctcccaacttcagcttcatgggccagctgctgcagtttgagtcccaggtgctggctccgcactgttcggcagaggctgggagccccgccatggctgtgctcgaccgaggcacctccaccaccaccgtgttcaacttccccgtctccatccctgtccactccacgaacagtgcgctgagctaccttcagagccccattacgacctctcccagctgctgaaaggccacgggaggtgaggctcttcacatcccattgggactccatgctccttgagaggagaaatgcaataactctgggaggggctcgagagggctggtccttatttatttaacttcacccgagttcctctgggtttctaagcagttatggtgatgacttagcgtcaagacatttgctgaactcagcacattcgggaccaatatatagtgggtacatcaagtccatctgacaaaatggggcagaagagaaaggactcagtgtgtgatccggtttctttttgctcgcccctgttttttgtagaatctcttcatgcttgacatacctaccagtattattcccgacgacacatatacatatgagaatataccttatttatttttgtgtaggtgtctgccttcacaaatgtcattgtctactcctagaagaaccaaatacctcaatttttgtttttgagtactgtactatcctgtaaatatatcttaagcaggtttgttttcagcactgatggaaaataccagtgttgggttttttttttagttgccaacagttgtatgtttgctgattatttatgacctgaaataatatatttcttcttctaagaagacattttgttacataaggatgacttttttatacaatggaataaattatggcatttctattg

SEQ ID NO: 38 - DNA, 2892 bp, Homo sapiens
gggggagcccctgcaagtttcccgggccgcgcgccgcgctcgctcgcctcccagcccgcggcccgagccgccgccgcgcccgccatgccctcggccaaacaaaggggctccaagggcggccacggcgccgcgagcccctcggagaagggtgcccacccgtcgggcggcgcggatgacgtggcgaagaagccgccgccggcgccgcagcagccgccgccgccgcccgcgccgcacccgcagcagcacccgcagcagcacccgcagaaccaggcgcacggcaagggcggccaccgcggcggcggcggcggcggcggcaagtcctcctcctcctcctccgcctccgccgccgctgccgccgccgccgcctcgtcctcggcgtcctgctcgcgcaggctcggcagggcgctcaactttctcttctacctcgccctggtggcggcggccgctttctcgggctggtgcgtccaccacgtcctggaggaggtccagcaggtccggcgcagccaccaggacttctcccggcagagggaggagctgggccagggcttgcagggcgtcgagcagaaggtgcagtctttgcaagccacatttggaacttttgagtccatcttgagaagctcccaacataaacaagacctcacagagaaagctgtgaagcaaggggagagtgaggtcagccggatcagcgaagtgctgcagaaactccagaatgagattctcaaagacctctcggatgggatccatgtggtgaaggacgcccgggagcgggacttcacgtccctggagaacacggtggaggagcggctgacggagctcaccaaatccatcaacgacaacatcgccatcttcacagaagtccagaagaggagccagaaggagatcaatgacatgaaggcaaaggttgcctccctggaagaatctgaggggaacaagcaggatttgaaagccttaaaggaagctgtgaaggagatacagacctcagccaagtccagagagtgggacatggaggccctgagaagtacccttcagactatggagtctgacatctacaccgaggtccgcgagctggtgagcctcaagcaggagcagcaggctttcaaggaggcggccgacacggagcggctcgccctgcaggccctcacggagaagcttctcaggtctgaggagtccgtctcccgcctcccggaggagatccggagactggaggaagagctccgccagctgaagtccgattcccacgggccgaaggaggacggaggcttcagacactcggaagcctttgaggcactccagcaaaagagtcagggactggactccaggctccagcacgtggaggatggggtgctctccatgcaggtggcttctgcgcgccagaccgagagcctggagtccctcctgtccaagagccaggagcacgagcagcgcctggccgccctgcaggggcgcctggaaggcctcgggtcctcagaggcagaccaggatggcctggccagcacggtgaggagcctgggcgagacccagctggtgctctacggtgacgtggaggagctgaagaggagtgtgggcgagctccccagcaccgtggaatcactccagaaggtgcaggagcaggtgcacacgctgctcagtcaggaccaagcccaggccgcccgtctgcctcctcaggacttcctggacagactttcttctctagacaacctgaaagcctcagtcagccaagtggaggcggacttgaaaatgctcaggactgctgtggacagtttggttgcatactcggtcaaaatagaaaccaacgagaacaatctggaatcagccaagggtttactagatgacctgaggaatgatctggataggttgtttgtgaaagtggagaagattcacgaaaaggtctaaatgaattgcgtgtgcagggcgcggatttaaagtccaatttctcatgaccaaaaaatgtgtggttttttcccatgtgtcccctaccccccaatttcttgtcccctcttaaagagcagttgtcaccacctgaacaccaaggcattgtattttcatgcccagttaacttatttacaatatttaagttctctgcttctgcatttggttggtttcctgaagcgcagcccctgtgaataacaggtggcttttcatggatgtctctagtcagagaaaaatgataaaggcttaaattgaggattaacagaagcagattaacctcagaaatcctgtctggctggcagatttcaagtaaaaaaaaaaaaaaggtgggttggggggacccttttctttctagttgtctttaaggaaaattaattttacttttttttttgttctggccgaaatttttatgagatatctctcacttgtcttccactttgaaccggttaaagctcatagctgtcagctctgaatgaggaggggagaagcccctgggtctttctttgaaaggaatccgctgcttgagggctgcctccctcatggtgtgcgtgtcgtttctcttcctgacgcatcttgtgatatcagaggtaactatgcaaagcatccaggcggttctgaatgtgaagcactacacccagcagagtcccggtgccctctgtccccactgccggcccatgttctctctccggaggtcaccaaggaatgcacaggtttcgactaccagaaaggggagtccttgggttctttcaaaaaattcgtgaggagagctgtctacagtggaatagggggtctccctggggaatgcaggccaagtccttttattttaacatgatgtccatgaagaggtttgccgtctgggcagccctgtcggcaaggagcgtgcatactgcgtttgtgtaattgtttgctgtatctcccttccctctgagctgtattgttctttaatggctgtcttgcccttcc

SEQ ID NO: 39 - DNA, 1121 bp, Homo sapiens
gggccgggccgggccgggggcgcgcgctctgcgagctggatgtccaggctgcgggcgctgctgggcctcgggctgctggttgcgggctcgcgcgtgccgcggatcaaaagccagaccatcgcctgtcgctcgggacccacctggtggggaccgcagcggctgaactcgggtggccgctgggactcagaggtcatggcgagcacggtggtgaagtacctgagccaggaggaggcccaggccgtggaccaggagctatttaacgaataccagttcagcgtggaccaacttatggaactggccgggctgagctgtgctacagccatcgccaaggcatatccccccacgtccatgtccaggagcccccctactgtcctggtcatctgtggcccggggaataatggaggagatggtctggtctgtgctcgacacctcaaactctttggctacgagccaaccatctattaccccaaaaggcctaacaagcccctcttcactgcattggtgacccagtgtcagaaaatggacatccctttccttggggaaatgcccgcagagcccatgacgattgatgaactgtatgagctggtggtggatgccatctttggcttcagcttcaagggcgatgttcgggaaccgttccacagcatcctgagtgtcctgaagggactcactgtgcccattgccagcatcgacattccctcaggatgggacgtggagaagggaaatgctggagggatccagccagacttgctcatatccctcacagcccccaaaaaatctgcaacccagtttaccggtcgctaccattacctggggggtcgttttgtgccacctgctctggagaagaagtaccagctgaacctgccaccctaccctgacaccgagtgtgtctatcgtctgcagtgagggaaggtgggtgggtattcttcccaataaagacttagagcccctctcttccagaactgtggattcctgggagctcctctggcaataaaagtcagtgaatggtggaagtcagagaccaaccctggggattgggtgccatctctctaggggtaacacaaagggcaagaggttgctatggtatttggaaacaatgaaaatggactgttagatgccaa

SEQ ID NO: 40 - DNA, 1298 bp, Homo sapiens
atgcaggcgcttaacattaccccggagcagttctctcggctgctgcgggaccacaacctgacgcgggagcagttcatcgctctgtaccggctgcgaccgctcgtctacaccccagagctgccgggacgcgccaagctggccctcgtgctcaccggcgtgctcatcttcgccctggcgctctttggcaatgctctggtgttctacgtggtgacccgcagcaaggccatgcgcaccgtcaccaacatctttatctgctccttggcgctcagtgacctgctcatcaccttcttctgcattcccgtcaccatgctccagaacatttccgacaactggctggggggtgctttcatttgcaagatggtgccatttgtccagtctaccgctgttgtgacagaaatcctcactatgacctgcattgctgtggaaaggcaccagggacttgtgcatccttttaaaatgaagtggcaatacaccaaccgaagggctttcacaatgctaggtgtggtctggctggtggcagtcatcgtaggatcacccatgtggcacgtgcaacaacttgagatcaaatatgacttcctatatgaaaaggaacacatctgctgcttagaagagtggaccagccctgtgcaccagaagatctacaccaccttcatccttgtcatcctcttcctcctgcctcttatggtgatgcttattctgtacagtaaaattggttatgaactttggataaagaaaagagttggggatggttcagtgcttcgaactattcatggaaaagaaatgtccaaaatagccaggaagaagaaacgagctgtcattatgatggtgacagtggtggctctctttgctgtgtgctgggcaccattccatgttgtccatatgatgattgaatacagtaattttgaaaaggaatatgatgatgtcacaatcaagatgatttttgctatcgtgcaaattattggattttccaactccatctgtaatcccattgtctatgcatttatgaatgaaaacttcaaaaaaaatgttttgtctgcagtttgttattgcatagtaaataaaaccttctctccagcacaaaggcatggaaattcaggaattacaatgatgcggaagaaagcaaagttttccctcagagagaatccagtggaggaaaccaaaggagaagcattcagtgatggcaacattgaagtcaaattgtgtgaacagacagaggagaagaaaaagctcaaacgacatcttgctctctttaggtctgaactggctgagaattctcctttagacagtgggcattaatt

SEQ ID NO: 41 - DNA, 4968 bp, Homo sapiens
cagacccggaagtggatcgtgcggagcaagcatcacaccatggcgtatgagtgttcctctgtgtagactcaacctgcgcctcgccgtcccccattcgcacacccgatgcccgggggtcgctacggacttaaaatctccgcaccgcaccctccacctcagaaacgttcctggatccgaacactgccccctgacgacctagagagatcccggctcccagcccactgagtggcttcagcctcgctggcgcctgccccgggccccgcctacaggggacccagctcttcttgcagccactggaagctgatcacctggagtgaagacctcacacgaagaagtctggaagaagaggaagaggaaagaaaaggagtcagggatggcccttactcaggtacggttgacatttagggatgtggccatagaattctctcaggaggagtggaaatgcctggaccctgctcagaggatcttatacagggacgtgatgttggagaactactggaaccttgtttctctgggactgtgtcattttgatatgaatattatctccatgttggaggaagggaaagagccctggactgtgaagagctgtgtgaaaatagcaagaaaaccaagaacgccggaatgtgtcaaaggcgtggtcacagatatccctcctaaatgtacaatcaaggatttgctaccaaaagagaagagcagtacagaagcagtattccacacagtggtgttggaaagacacgaaagccctgacattgaagacttttccttcaaggaaccccagaaaaatgtgcatgattttgagtgtcaatggagagatgacacaggaaattacaagggagtgcttatggcccagaaagaaggtaaaagagatcaacgcgacagaagagacatagaaaacaagcttatgaacaatcagcttggagtaagctttcattctcatctgcctgaactgcagctatttcaaggtgaggggaaaatgtatgaatgtaatcaagttgagaagtctaccaacaatggttcctcagtgtcaccacttcaacaaattccttctagtgtccaaacccacaggtctaaaaaatatcatgaacttaaccatttttcattactcacacaaagacgaaaagcaaacagttgtggaaaaccttataaatgtaatgaatgtggcaaggcgttcactcagaattcgaaccttacaagtcataggagaattcatagtggagagaagccttacaaatgcagtgagtgcggcaaaacctttactgttcgttcaaatctaactattcatcaggtcatccatactggagaaaaaccttacaaatgtcatgagtgtggcaaggtcttcaggcacaattcataccttgcaactcatcggcgaattcatactggagagaaaccttacaagtgtaatgagtgtggaaaagcctttagaggacattcaaacctaactacccatcagttaattcatactggagaaaaaccgttcaaatgtaatgaatgtggcaagctcttcactcaaaattcacaccttataagtcattggagaattcacactggagagaaaccttacaagtgcaatgagtgcggcaaagcctttagtgttcgttcaagcctagcaatccatcagacaatccacactggagaaaaaccttacaaatgtaatgaatgtggcaaagtctttaggtacaattcatacctcggaaggcatcggagagttcatactggtgagaaaccttacaagtgtaatgaatgtggcaaagccttcagtatgcattcaaacctagctacccatcaggtcatccatactggaacaaaacctttcaaatgcaatgaatgcagcaaggttttcactcaaaattcacaacttgcaaatcatcgaagaattcatactggagagaaaccttacaagtgtaatgagtgtgggaaagccttcagtgttcgttcaagtctgactacccatcaggcaatccattctggagagaaaccttacaaatgtattgaatgtggcaagagcttcactcaaaaatcacaccttagaagtcatcggggaattcattctggagagaaaccttacaagtgtaatgaatgtggtaaagtcttcgctcaaacatcacaacttgcaaggcattggagagttcatactggagaaaaaccttacaagtgtaatgactgtggcagagcctttagtgatcgttcaagcctaacttttcatcaggcaatacatactggagagaaaccttacaaatgtcatgaatgcggcaaggtttttaggcacaattcataccttgcaactcatcggcgaattcatactggagagaaaccttacaagtgtaatgagtgtgggaaagcctttagtatgcattcaaacctaactacccataaggtcatccatactggagagaagccttacaaatgtaatcaatgtggcaaggtcttcactcagaactcacaccttgcaaatcatcaaaggactcacaccggagagaaaccttaccgatgcaatgagtgtgggaaagccttcagtgttcgttcaagcctaaccacccatcaggcaatccatactgggaaaaaaccttacaaatgtaatgaatgtggcaaggtctttactcaaaatgctcacctggcaaatcaccgaagaattcatactggggagaaaccttacaggtgtacagagtgtgggaaagcctttagggtaagatcaagtctaactacccatatggcaatccacactggagaaaagcgttacaaatgtaatgagtgtggcaaggtcttcaggcagagttcaaatcttgcaagtcatcacagaatgcataccggagagaaaccttacaaatgagtgtggtgaggtcattaggtacaattcactcctttcacatcagttaatttcattcttgacagaatccttacaaatgtagtgacagtggccaatccctcatgagttgaagcattaatagatatgagaggccataagcaagagacatcatgtaaacatatgtggcagagggtctatccaggcctcgcaggttactaggcatcaagatttatatctttgatgaaacgaaacaaatgtaatatgcatcctgaggccattacccagtgaccgatggtaagtgaggattcctaggaggaataacagtctctggtttccctgtttgcctttgatattatacactgtagaatactcacaagtccaaatatgctaaaaattatatatttttaactcacatacgaaaaggttgcaggatatttgtaggcagtcagttaccttcaccttatgaaatgtttcactgagttatttgaggttttttggaaagcctactattgcgtttcaatgtgaactttgaaatcttattgtgcatccttacacaccttccatggtgctttcttggaaagatcattgggatggaaggatcattgattgggtgaagatcattgattaggtgaaggattatttctatccaatttgtgaagaaggaggactttgcttttaaaattaagtatcatctgaattagcatttgggagtggcgaaaaacaatgtaaaactatgatgtcactcaccattctgataatgttcagggtgcctttctcctaccaggagagtactgtggcttagaggaaagaaatggtctatcaactgaacatgaaatggagcaggccaagaccttaggacattgggatttttgtgggaggagagtaataggtaattagacactgattgtgtggtagaaatactgcaggggaaaaggtcgccctcttatgcatcaaagagcaatacctgttgtttagcaaagagtgatgaaaaattgatcttgttttgaaattgaagagagaggccaggcgcggtggctcacacctgtaatcccagcactttgggaggctgaggcaggtggatcacctgaggtcgggagttcgagaccagcctgaccaacatggagaaaccccaattgtactaaaaatacaaaattagccgggcgtggtggcaggtgcctgtaatcccagctacttgggaggctgaggcaggagagtgcttgaacccaggaggcggaggttgtggtgagccaagatcatgccactgcactccagcctgggcaacaagaacaaaactccatctaaagaagaaaaagaaaaactgaagagagagtagttgtcagagtgaagagtttaatcaacagaagtagagtaacatattctttagtagaactcacattatctgcttgaagcacattttgctaatgttttattcagaatgtatcatagatataatgttttaactaataaaatagaatggtttttctctatgaatgaatcacattctttctgccaacatagttttatcctgtctcagtaggatactccataacacaatagcagtacaccactaggctcttaaacgatcaagaacaatttttttcatggtgaaatcaaataacgcagttttggaaacctataaccgcattttgtgcttgaattacgtgccccacactgtggcttaggatacttattggggtataatgaaaatcttactgaaagttaatttcacattcttacaccccaaaatctgcattgccattgatgcatatgcaccacattattatatttccacatcagtttcttgtgtgccaaataagacccatgctttgcatcttggtttccatgaagtgaaaatacatagtaagaatgcgagaaatataaatcaggccaggcacggtggctcacacctgtaatcccagtactttgggaggccaaggcaagcagatcacctgaagtcaggagagaccagcctggccagcatagtgaaaccccatctctactaaaaatacaaacttagctgggcttagtggtgcatgcctgtagtctcagctacttgggaggctgaggcaggagaattgcttgaatccaagaggcagaggttctattaatggagatcattccattacactccagcctgggcaccaggaacgaaactcgttctc

SEQ ID NO: 42 - DNA, 5503 bp, Homo sapiens
ttcatctgtacctttcaagtattcaaatagaaaaatataaacaatgtaaataaaatagcaaaacaatgtaatatctcataaaactgcaatggtaaaagcatttatcctattgaaattccacaatttttatttgaaaatattatcgacatgtaattcaagtggcatttagaagaataatttaaaagcaacaactctatagaaagcttgtaaaatgattaagtagtttaaaccaaataaaacaatttctgagtcagtcatctccagtaggtctattttagtctcaagataaattcatttctggtgacaactgaagttcttagttatttgttagtatatattggagacatttacaataaagcttagagcacaatgggaaatgaaagtatcatgttttttttaagaccaaatgtattgcagaaatgtgagtaatttaatccgatgctacaatctgatcattctgatctaatctgatcatttaataacactaaataaaaccttcatctcacattctttggctgtttcttttaaaatatgggtttacggataaatcaaataaattcaaaacaaagtaataagcaaatgatttttttttctcagtaatctagtagagtattacatttagaagtaatctgtatctcagtgcagtaactatttaggactgtaagcgccgctgttcacctactggaagacaaatgcaaccgaaaacactcagatctcacacctcacgaagacccgcagatgccacaaactaactgctggactgcagcgaaacccgacccctgtttggaggcactccaggtttccggaggattgtcatctccatagctgcggcaagaaactaaataagacccatttatgcacagtgaagattctgagaggattctgcagcaaaacaacaatggccgctccacagagtcgccccagacgcggcgagctgatcctgctgtgcgcgctgctgggaacgctgtgggaaatcgggaggggacagattcgctactctgtgccagaagagacggacaaaggctccttcgtgggtaatatctccaaggacctggggctggacccccggaagctggcgaagcacggagtccgtatcgtctccagaggtaggacgcagctctttgctctgaacccgcgcagcggcagcttgatcaccgcgggcaggatagatcgggaggagctctgcgctcagagcccgcggtgtctgataaatattaacaccctggttgaggataaaggaaaactctttggggtagaaatagaaataattgatattaacgataataacccaaaattccaggtcgaagatctagaagtaaaaattaacgaaatcgcggttcctggagcacgttatccactcccagaagctgttgacccggatgtgggcgtgaactccctccagagctaccagctcagccccaatcaccacttctccctggacgtgcagactggagacaatggagccataaacccagagctggtgctggagcgcgccctggacagggaggaagaggctgctcaccacctggtcctcacggcctcggatggcggcaagccgcctcgctctagcacagtgcgcatccacgtgacagtgttggatacaaatgacaatgccccggtttttcctcacccgatttaccgagtgaaagtccttgagaacatgcccccaggcacgcggctgcttactgtaacagccagcgacccggatgagggaatcaacggaaaagtggcatacaaattccggaaaattaatgaaaaacaaactccgttattccagcttaatgaaaatactggggaaatatcaatagcaaaaagtctagattatgaagaatgttcattttatgaaatggaaatacaagccgaagatgtgggggcacttctggggaggaccaaattgctcatttcggtggaagatgtaaatgacaatagaccagaagtgatcattacgtctttgtttagcccagtgttagaaaattctcttcccgggacagtaattgccttcttgagtgtgcatgaccaagactctggaaagaatggtcaagttgtctgttacacacgtgataatttaccttttaaattagaaaagtcaataggtaattattatagattagtgacaaggaaatatttggaccgagaaaatgtctctatctacaatatcacagtgatggcctcagatctaggaacaccacctctgtccactgaaactcaaatcgctctgcacgtggcagacattaacgacaaccctcctactttccctcatgcctcctactcagcgtatatcctagagaacaacctgagaggagcctccatcttttccttgactgcacacgaccccgacagccaggagaatgcccaggtcacttactctgtgaccgaggacacgctgcagggggcgcccctgtcctcgtatatctccatcaactctgacaccggtgtcctgtatgcgctgcaatctttcgactatgagcagatccgagacctgcagctactggtaacagccagcgacagcggggacccgcccctcagcagcaacatgtcactgagcctgttcgtgctggaccagaatgacaacgcgcccgagatcctgtaccccgccctccccacagacggttccactggcgtggagctggcgccccgctccgcagagcgtggctacctggtgaccaaggtggtggcggtggacagagactcgggccagaacgcctggctgtcctaccgcctgctcaaggccagcgagccgggactcttctcggtgggtctgcacacgggcgaggtgcgcacggcgcgagccctgctggacagagatgcgctcaagcagagcctcgtggtggccgtccaggaccatggccagccccctctctccgccactgtcacgctcaccgtagccgtggctgacagcatccccgaagtcctgaccgagttgggcagtctgaagccttcggtcgacccgaacgattcgagccttacactctatctcgtggtggcagtggctgccatctcctgtgtcttcctcgcctttgtcgctgtgcttctggggctcaggctgaggcgctggcacaagtcacgcctgctccaggattccggtggcagattggtaggcgtgcctgcctcacattttgtgggtgttgaggaggtacaggctttcctgcagacctattcccaggaagtctccctcaccgccgactcgcggaagagtcacctgatctttccccagcccaactacgcagacatgctcatcagtcaggagggctgtgagaaaaatgattctttgttaacatccgtagattttcatgaatataagaatgaagctgatcatggtcagcaagccccgcccaacacggactggcgtttctctcaggcccagagacccggcaccagcggctcccaaaatggcgatgacaccggcacctggcccaacaaccagtttgacacagagatgctgcaagccatgatcttggcgtccgccagtgaagctgctgatgggagctccaccctgggagggggtgccggcaccatgggattgagcgcccgctacggaccccagttcaccctgcagcacgtgcccgactaccgccagaatgtctacatcccaggcagcaatgccacactgaccaacgcagctggcaagcgggatggcaaggccccagcaggtggcaatggcaacaagaagaagtcgggcaagaaggagaagaagtaacatggaggccaggccaagagccacagggcggcctctccccaaccagcccagcttctccttacctgcacccaggcctcagagtttcagggctaacccccagaatactggtaggggccaaggccatgctccccttgggaaacagaaacaagtgcccagtcagcacctaccccttcccccccagggggttgaatatgcaaaagcagttccgctgggaacccccatccaatcaactgctgtacccatgggggtagtggggttactgtagacaccaagaaccatttgccacaccccgtttagttacagctgaactcctccatcttccaaatcaatcaggcccatccatcccatgcctccctcctccccaccccactccaacagttcctctttcccgagtaaggtggttggggtgttgaagtaccaagtaacctacaagcctcctagttctgaaaagttggaagggcatcatgacctcttggcctctcctttgattctcaatcttcccccaaagcatggtttggtgccagccccttcacctccttccagagcccaagatcaatgctcaagttttggaggacatgatcaccatccccatggtactgatgcttgctggatttagggagggcattttgctaccaagcctcttcccaacgccctggggaccagtcttctgttttgtttttcattgtttgacgtttccactgcatgccttgacttcccccacctcctcctcaaacaagagactccactgcatgttccaagacagtatggggtggtaagataaggaagggaagtgtgtggatgtggatggtgggggcatggacaaagcttgacacatcaagttatcaaggccttggaggaggctctgtatgtcctcaggggactgacaacatcctccagattccagccataaaccaataactaggctggacccttcccactacataatagggctcagcccaggcagccagctttgggctgagctaacaggaccaatggattaaactggcatttcagtccaaggaagctcgaagcaggtttaggaccaggtccccttgagaggtcagaggggcctctgtgggtgctgggtactccagaggtgccactggtggaagggtcagcggagccccagcaggaagggtgggccagccaggccattcttagtccctgggttggggaggcagggagctagggcagggaccaaatgaacagaaagtctcagcccaggatggggcttcttcaacagggcccctgccctcctgaagcctcagtccttcaccttgccaggtgccgtttctcttccgtgaaggccactgcccaggtccccagtgcgccccctagtggccatagcctggttaaagttccccagtgcctccttgtgcatagaccttcttctcccacccccttctgcccctgggtccccggccatccagcggggctgccagagaaccccagacctgcccttacagtagtgtagcgccccctccctctttcggctggtgtagaatagccagtagtgtagtgcggtgtgcttttacgtgatggcgggtgggcagcgggcggcgggctccgcgcagccgtctgtccttgatctgcccgcggcggcccgtgttgtgttttgtgctgtgtccacgcgctaaggcgaccccctcccccgtactgacttctcctataagcgcttctcttcgcatagtcacgtagctcccaccccaccctcttcctgtgtctcacgcaagttttatactctaatatttatatggctttttttcttcgacaaaaaaataataaaacgtttcttctgaaaagctg

SEQ ID NO: 43 - DNA, 1324 bp, Homo sapiens
cccactgcgcaggcgcttacagtgcaccaagatggccgcccccgtggatctagagctgaagaaggccttcacagagcttcaagccaaagttattgacactcaacagaaggtgaagctcgcagacatacagattgaacagctaaacagaacgaaaaagcatgcacatcttacagatacagagatcatgactttggtagatgagactaacatgtatgaaggtgtaggaagaatgtttattcttcagtccaaggaagcaattcacagtcagctgttagagaagcagaaaatagcagaagaaaaaattaaagaactagaacagaaaaagtcctacctggagcgaagcgttaaggaagctgaggacaacatccgggagatgctgatggcacgaagggcccagtagggagcctctctgggaagctcttcctcctgcccctcccattcctggtgggggcagaggagtgtctgcagggaaacagcttctcctctgccccgatggatgctttatttggatggcctggcaacatcacattttctgcatcaccctgagccccatttgcttcccagccctggagtttttacccggctttgcctgccacctctgcccaggacactcttccctctcgggatgtgtgatgaactcccaggagagggaagatgggagccagggcaagataggaagctctgcctgagctttccactaggcacgccagccagaccaataaaaagcgtctgtcccactctgctaagcctggttttcttgagcagagggatggaacagagggtgagagaggcagtggccgtctccacctcagctcctgctccctctgcatcagagcccttcctttcttgggggatgggccttgccctcttctcttttcccttcctgtacctttgactaacgctcagcttccgggcctgcatgcagtagacagaagaggaagaaagaacagatgttcacagctgaatctcagtgaacagaatagcagtccctggatggcagtctgcctaaagattcctttccctgccttctcccatacattccaaaaggaagttcaacagtaagcagcacctccaagactgtctccttttggccaatatcataagatggacgccataatcctgaggcctcctagaggctgagggggcaacggtgtgatccagctggctcatcccagcccaggtgggccaattattcaattttcaagaattttgttgcaagccagttgtcaaacacagccattataattatgtaaatttgcaaattatgttaaaaacaaggacaataaatattcaaaatgcatccctaattactacatttgaccac

SEQ ID NO: 44 - DNA, 2669 bp, Homo sapiens
ccatcctgcagctctgagagggacagacggtgctcagcctgtgtcctggggcaaagctggattcattttcctccctggcgatcttctggggcccacagctggtgatatggaggcactgacaccctggtctcggcgcttgttttagaagaggcagaacagtgataaagacaaggatctaaatgggcaaggacgccctgccctcactgggctcactggcagccctgaccctctattctgcaccctgtgagccaccgagactgaaccaaacccaggaagcggcgccaccaaccagcctcgcagaggcagaggccctggagcagtgacagcacaggagatctgctggctcgggggaaggggaggaaagaggaaaacaaagggagtgatcgagtgagcctcgccccgccctccctgcgccggcccatgatgtgtcagtcagaggcgcggcaaggaccagagctccgcgcggcgaaatggttgcacttcccccagctggccctgaggcggaggctggggcagctgagctgcatgtccagacccgctctgaaactgcgctcctggcccttgaccgtcctctactacctcctgcccttcggcgccctcagaccgctcagccgggtgggatggaggcccgtaagcagggtggctttgtacaagtcagtgccaacgcgcttgctgtcacgggcctggggtcgcctcaatcaggtggagctgccacactggctgcgcaggcccgtctacagcctgtacatctggacgtttggggtgaacatgaaagaggccgctgtggaggacctgcatcactaccgcaacctcagcgagttcttccggcgcaagctgaagccgcaggcccggcctgtctgtggcctgcacagcgtgattagcccatcggatggaaggatcctcaactttgggcaggtgaagaactgtgaggtggagcaggtaaagggggtcacctactccctggagtcgttcctgggcccgcgtatgtgcacagaggacctgcccttcccaccagccgcgtcgtgtgactccttcaagaaccagctggtcacccgggaagggaatgagctctatcactgtgtcatctacctggcccctggggactaccactgcttccactcccccaccgactggactgtgtcccaccggcgccacttcccaggctccctgatgtcagtgaaccctggcatggctcgctggatcaaagagctcttctgccataacgagcgggtggtcctgacgggggactggaaacatggcttcttctcactgacagctgtgggggccaccaacgtgggctccattcgcatctactttgaccgggacctgcacacaaacagcccaaggcacagcaagggctcctacaatgacttcagcttcgtgacgcacaccaatagagagggcgtccccatgcgtaagggcgagcacctgggcgagttcaacctgggctccaccatcgtgctcatcttcgaggcccccaaggacttcaatttccagctgaaaacaggacagaaaatccgctttggggaagccctgggctcgctctagagtctctttcctgattatggctgctaagggatcttttccaaacagagtgagggtcttttcaagagggaggcccatgaggccatccaggtaagggcctgcctcagcgtggttgggagtctgaccaggtaggacttgaatgattcggctaccacctgttccagaggtgcagacaagaggtggcgagagcccccatcatgcccctcaacctatcccgttccttctgcctacaaataaaaagtgcaggctggaatgatctcagtcacatttggatctttttaaacactgtatagacggaagagcctgcattcctgaccgaaccttcagttggtctcggttgtcgttttttcttgctgctcctccccccatcacctgagctgttttctgttggccccttttgttttttggccttaacgctcctgctgcacagggtgaggtgcctccttggcacagactgtggatgcctctcccccagcagagccacacagccttcgtgacaactgctttccgttcccacattcacctcatcctgctctttagaaaaagcagtctttgtgcttgtggctgaacgcatcaccctggactctgctagtgtcttctgaggacactgatgacactgattaatgatacagacctttgcaggacctgatgagtgacccttctggagctggccaggtcctctgcagcaggcaagaccaatcaatcactgaacctgcctcatggcaccagagtgaacagggcaggcaggtagtaggcccagctggggaaatgggagagttcctgtccccctccacatatccctacatgaaatatgggaaagttgctgctattgattcagggtctgtcttggaggcagaggacccttggtggatagttggtcagtgcctggaaaacctgtcccagtttatcaggaacgcaggcctggggagcccccagtggcggggacagggccagatttcatgttgaccctggggatgctgtgaatttctcctgcaggagagacatcattgaattttttcaactgtatcagtagcacagtatttttgtatgaaaagtgggagacttctgaacagtaattcatttaattgcaaagcattttgaaataaaaaaaatcaaacttaaaa

SEQ ID NO: 45 - DNA, 2046 bp, Homo sapiens
agttctcactgagacctgtcaccccgactcaacgtgagacgcaccgcccggactcaccatgcgtgaatgcatctcagtccacgtggggcaggcaggtgtccagatgggcaatgcctgctgggagctctattgcttggaacatgggattcagcctgatgggcagatgcccagtgacaagaccattggtggaggggacgactccttcaccaccttcttctgtgaaactggtgctggaaaacacgtaccccgggcagtttttgtggatctggagcctacggtcattgatgagatccgaaatggcccataccgacagctcttccacccagagcagctcatcactgggaaagaggatgctgccaacaactatgcccgtggtcactataccattggcaaggagatcattgacccagtgctggatcggatccgcaagctgtctgaccagtgcacaggacttcagggcttcctggtgttccacagctttggtgggggcactggctctggcttcacctcactcctgatggagcggctctctgttgactatggcaagaaatccaagctggaattctccatctacccagccccccaggtgtctacagccgtggtcgagccctacaactctatcctgaccacccacaccaccctggagcactcagactgtgccttcatggtggacaacgaagcaatctatgacatctgccgccgcaacctagacatcgagcgcccaacctacaccaacctcaatcgcctcattagccaaattgtctcctccatcacagcttctctgcgctttgacggggccctcaatgtggacctgacagagttccagaccaacctggtgccctaccctcgcatccacttccccctggccacctatgcaccagtcatctctgcagaaaaggcataccacgagcagctgtcggtggcagagatcaccaatgcctgctttgagcctgccaaccagatggtaaagtgtgatccccggcacggcaagtacatggcctgctgcctgctgtaccgtggagatgtggtgcccaaggatgtcaacgctgccattgccgccatcaagaccaagcgcagcattcagtttgtggactggtgccccacaggcttcaaggttggtatcaactaccagcctcccactgtggtgcctgggggtgacctggccaaggtgcagcgtgccgtgtgcatgctgagcaacacgaccgccatcgccgaggcctgggcccgcctggaccacaagttcgacctgatgtatgccaagagggcgtttgtgcactggtatgtgggtgagggcatggaggagggtgagttctccgaggcccgtgaggatatggctgccctggagaaggattatgaggaggtgggcatcgactcctatgaggacgaggatgagggagaagaataaagcagctgcctggagcctattcactatgtttattgcaaaatcctttcgaaataaacagtttccttgcacggtttcttgttccctctgagtgcttgagcttctgctgccttccccttcatgctgctgctgctctgtttgctgttcatgacccttatcccttccatcgctgaaggtgagacctgcaaaggggttcttgccaggcccaggaagcataaccccagggactttaaattgaagtcctagggttactcagtatagggaggaaatgaggaccaaaatccaggcacaaactgttgaaggatgagtcttcagctcctttccaagtaggagtataatccagtggtttctgtctttgaaagttagactgctaccctgttcttcctgctgcctctacatttaccaactctggaagcaaggcttggcccaggctcctctgtgcattatgagggtttgggagtggggctgggctggcccagagttcctgggcatggagccacgtcataagcttgggggatgggagggaacacaggcgatctcctagagttgtttgtgccactgcacctctgagcagctttgcatagcttcctgtcttgctgctttgctggagctggggctgtgccattaaaagtcaggtcatctcc

SEQ ID NO: 46 - DNA, 3496 bp, Homo sapiens
atggcgagtgtagtgctgccgagcggatcccagtgtgcggcggcagcggcggcggcggcgcctcccgggctccggctccggcttctgctgttgctcttctccgccgcggcactgatccccacaggtgatgggcagaatctgtttacgaaagacgtgacagtgatcgagggagaggttgcgaccatcagttgccaagtcaataagagtgacgactctgtgattcagctactgaatcccaacaggcagaccatttatttcagggacttcaggcctttgaaggacagcaggtttcagttgctgaatttttctagcagtgaactcaaagtatcattgacaaacgtctcaatttctgatgaaggaagatacttttgccagctctataccgatcccccacaggaaagttacaccaccatcacagtcctggtcccaccacgtaatctgatgatcgatatccagaaagacactgcggtggaaggtgaggagattgaagtcaactgcactgctatggccagcaagccagccacgactatcaggtggttcaaagggaacacagagctaaaaggcaaatcggaggtggaagagtggtcagacatgtacactgtgaccagtcagctgatgctgaaggtgcacaaggaggacgatggggtcccagtgatctgccaggtggagcaccctgcggtcactggaaacctgcagacccagcggtatctagaagtacagtataagcctcaagtgcacattcagatgacttatcctctacaaggcttaacccgggaaggggacgcgcttgagttaacatgtgaagccatcgggaagccccagcctgtgatggtaacttgggtgagagtcgatgatgaaatgcctcaacacgccgtactgtctgggcccaacctgttcatcaataacctaaacaaaacagataatggtacataccgctgtgaagcttcaaacatagtggggaaagctcactcggattatatgctgtatgtatacgatccccccacaactatccctcctcccacaacaaccaccaccaccaccaccaccaccaccaccaccatccttaccatcatcacagattcccgagcaggtgaagaaggctcgatcagggcagtggatcatgccgtgatcggtggcgtcgtggcggtggtggtgttcgccatgctgtgcttgctcatcattctggggcgctattttgccagacataaaggtacatacttcactcatgaagccaaaggagccgatgacgcagcagacgcagacacagctataatcaatgcagaaggaggacagaacaactccgaagaaaagaaagagtacttcatctagatcagcctttttgtttcaatgaggtgtccaactggccctatttagatgataaagagacagtgatattggaacttgcgagaaattcgtgtgtttttttatgaatgggtggaaaggtgtgagactgggaaggcttgggatttgctgtgtaaaaaaaaaaaaaatgttctttggaaagtacactctgctgtttgacacctcttttttcgtttgtttgtttgtttaatttttatttcttcctaccaagtcaaacttggatacttggatttagtttcagtagattgcagaaaattctgtgccttgttttttgtttgtttgttgcgttcctttcttttccccctttgtgcacatttatttcctccctctaccccaatttcggattttttccaaaatctcccattttggaatttgcctgctgggattccttagactcttttccttcccttttctgttctagttttttacttttgtttatttttatggtaactgctttctgttccaaattcagtttcataaaaggagaaccagcacagcttagatttcatagttcagaatttagtgtatccataatgcattcttctctgttgtcgtaaagatttgggtgaacaaacaatgaaaactctttgctgctgcccatgtttcaaatacttagagcagtgaagactagaaaattagactgtgattcagaaaatgttctgtttgctgtggaactacattactgtacagggttatctgcaagtgaggtgtgtcacaatgagattgaatttcactgtctttaattctgtatctgtagacggctcagtatagataccctacgctgtccagaaaggtttggggcagaaaggactcctcctttttccatgccctaaacagacctgacaggtgaggtctgttccttttatataagtggacaaattttgagttgccacaggaggggaagtagggaggggggaaatacagttctgctctggttgtttctgttccaaatgattccatccacctttcccaatcggccttacttctcactaatttgtaggaaaaagcaagttcgtctgttgtgcgaatgactgaatgggacagagttgatttttttttttttttcctttgtgcttagttaggaaggcagtaggatgtggcctgcatgtactgtatattacagatatttgtcatgctgggatttccaactcgaatctgtgtgaaactttcattccttcagatttggcttgacaaaggcaggaggtacaaaagaagggctggtattgttctcacactggtctgctgtcgctctcagttctcgataggtcagagcagaggtggaaaaacagcatgtacggattttcagttacttaatcaaaactcaaatgtgagtgtttttatctttttacctttcatacactagccttggcctctttcctcagccttaagaaccatctgccaaaaattactgatcctcgcatgatggcagccatagtgcatagctactaaaatcagtgaccttgaacatatcttagatggggagcctcgggaaaaggtagaggagtcacgttaccatttacatgttttaaagaaagaagtgtggggattttcactgaaacgtctaggaaatctagaagtagtcctgaaggacagaaactaaactcttaccatatgtttggtaagactccagactccagctaacagtccctatggaaagatggcatcaaaaaagatagatctatatatatatataaatatatattctattacattttcagtgagtaattttggattttgcaaggtgcatttttactattgttacattatgtggaaaacttatgctgatttatttaagggggaaaaagtgtcaactctttgttatttgaaaacatgtttatttttcttgtctttattttaacctttgatagaaccattgcaatatgggggccttttgggaacggactggtatgtaaaagaaaatccattatcgagcagcattttatttacccctcccctatccctaggcacttaaccaagacaaaaagccacaatgaacatccctttttcaatgaattttataatctgcagctctattccgagcccttagcacccattccgaccatagtataatcatatcaaagggtgagaatcatttagcatgttgttgaaaggttttttttcagttgttcttttt

SEQ ID NO: 47 - DNA, 2976 bp, Homo sapiens
cacaaactgttgggcccggagtcggaagagacccgggtttgggaaggaccccagggtcaggcgtcctggtggaagggcgggcctctttctctcttgctcagcagggagtccagagccctggaggaaagccagctcagctccgcatcggcgtcggcggttgggacgcacacactctgcgtcatggagggctgaggccgatgatgaattccggagtgcctgtcaggcttgctgtgtcactcggcccgctcggcgcgccccttcccagccgcccttccgtaccggctctcgggctcttccggtctccggccgccccttacctgcaggctcttctcccgccgcggcccggcgctctccgagtcgcccctgcggactggtctcgcacagtgcctgggcaccgggcgccagacagacactggccatgacgagcggcgcaaccaggtaccggctgagctgctcgctccggggccacgagctggacgtacggggcctggtgtgctgcgcctatccgccgggagcctttgtgtccgtgtcccgagaccgcaccacccgcctctgggccccagacagtccaaacaggagctttacagaaatgcactgtatgagtggccattccaattttgtatcttgtgtatgcatcataccctcaagtgacatctaccctcatggcctaattgccaccggtggaaatgaccacaatatatgcattttctcactggacagtccaatgccactttatattctaaaaggccacaaaaatactgtttgtagtctatcatctggaaaatttgggacattacttagtggttcatgggacaccactgctaaagtctggctgaatgacaagtgcatgatgaccttgcagggtcatacagctgcagtgtgggcggtaaagatcttacctgaacagggcttaatgttgactggatcagcagacaagactgttaaactgtggaaggctggaagatgtgagaggactttttcagggcatgaagactgtgtaagaggtttggcaattttgagtgaaacagaatttctttcctgtgcaaatgatgctagtattagaaggtggcaaatcactggcgagtgtcttgaagtatattatggacatacaaattatatttatagcatatccgtttttccaaattgtagagactttgtgacaacagcagaggacagatctctgagaatctggaaacatggggaatgtgctcaaactatccgacttccagctcagtctatatggtgctgctgtgtgctcgacaatggtgacattgtggttggtgcgagtgatggcattattagagtgtttacagaatcagaagatcgaacagcaagtgctgaagaaatcaaggcttttgaaaaagaactgtctcacgcaaccattgattctaaaactggcgatttaggggacatcaatgctgagcagcttcctgggagggaacatcttaatgaacctggtactagagaaggacagactcgtctaatcagagatggggagaaagtcgaagcctatcagtggagtgttagtgaagggaggtggataaaaattggtgatgttgttggctcatctggtgctaatcagcaaacatctggaaaagttttatatgaagggaaagaatttgattatgttttctcaattgatgtcaatgaaggtggaccatcatataaattgccatataataccagtgatgacccttggttaactgcatacaacttcttacagaagaatgatttgaatcctatgtttctggatcaagtagctaaatttattattgataacacaaaaggtcaaatgttgggacttgggaatcccagcttttcagatccatttacaggtggtggtcggtatgttccgggctcttcgggatcttctaacacactacccacagcagatccttttacaggtgctggtcgttatgtaccaggttctgcaagtatgggaactaccatggccggagttgatccatttacagggaatagtgcctaccgatcagctgcatctaaaacaatgaatatttatttccctaaaaaagaggctgtcacatttgaccaagcaaaccctacacaaatattaggtaaactgaaggaacttaatggaactgcacctgaagagaagaagttaactgaggatgacttgatacttcttgagaagatactgtctctaatatgtaatagttcttcagaaaaacccacagtccagcaacttcagattttgtggaaagctattaactgtcctgaagatattgtctttcctgcacttgacattcttcggttgtcaattaaacaccccagtgtgaatgagaacttctgcaatgaaaaggaaggggctcagttcagcagtcatcttatcaatcttctgaaccctaaaggaaagccagcaaaccagctgcttgctctcaggactttttgcaattgttttgttggccaggcaggacaaaaactcatgatgtcccagagggaatcactgatgtcccatgcaatagaactgaaatcagggagcaataagaacattcacattgctctggctacattggccctgaactattctgtttgttttcataaagaccataacattgaagggaaagcccaatgtttgtcactaattagcacaatcttggaagtagtacaagacctagaagccacttttagacttcttgtggctcttggaacacttatcagtgatgattcaaatgctgtacaattagccaagtctttaggtgttgattctcaaataaaaaagtattcctcagtatcagaaccagctaaagtaagtgaatgctgtagatttatcctaaatttgctgtagcagtggggaagagggacggatatttttaattgattagtgtttttttcctcacatttgacatgactgataacagataattaaaaaaagagaatacggtggattaagtaaaattttacatcttgtaaagtggtggggaggggaaacagaaataaaatttttgcactgctgaa

SEQ ID NO: 48 - DNA, 3633 bp, Homo sapiens
gccaccacgtgtgtccctgcgcccggtggccaccgactcagtccctcgccgaccagtctgggcagcggaggagggtggttggcagtggctggaagcttcgctatgggaagtcgttcctttgctctctcgcgcccagtcctcctccctggttctcctcagccgctgtcggaggagagcacccggagacgcgggctgcagtcgcggcggcttctccccgcctgggcggccgcgccgctgggcaggtgctgagcgcccctagagcctcccttgccgcctccctcctctgcccggccgcagcagtgcacatggggtgttggaggtagatgggctcccggcccgggaggcggcggtggatgcggcgctgggcagaagcagccgccgattccagctgccccgcgcgccccgggcgcccctgcgagtccccggttcagccatggggacctctccgagcagcagcaccgccctcgcctcctgcagccgcatcgcccgccgagccacagccacgatgatcgcgggctcccttctcctgcttggattccttagcaccaccacagctcagccagaacagaaggcctcgaatctcattggcacataccgccatgttgaccgtgccaccggccaggtgctaacctgtgacaagtgtccagcaggaacctatgtctctgagcattgtaccaacacaagcctgcgcgtctgcagcagttgccctgtggggacctttaccaggcatgagaatggcatagagaaatgccatgactgtagtcagccatgcccatggccaatgattgagaaattaccttgtgctgccttgactgaccgagaatgcacttgcccacctggcatgttccagtctaacgctacctgtgccccccatacggtgtgtcctgtgggttggggtgtgcggaagaaagggacagagactgaggatgtgcggtgtaagcagtgtgctcggggtaccttctcagatgtgccttctagtgtgatgaaatgcaaagcatacacagactgtctgagtcagaacctggtggtgatcaagccggggaccaaggagacagacaacgtctgtggcacactcccgtccttctccagctccacctcaccttcccctggcacagccatctttccacgccctgagcacatggaaacccatgaagtcccttcctccacttatgttcccaaaggcatgaactcaacagaatccaactcttctgcctctgttagaccaaaggtactgagtagcatccaggaagggacagtccctgacaacacaagctcagcaagggggaaggaagacgtgaacaagaccctcccaaaccttcaggtagtcaaccaccagcaaggcccccaccacagacacatcctgaagctgctgccgtccatggaggccactgggggcgagaagtccagcacgcccatcaagggccccaagaggggacatcctagacagaacctacacaagcattttgacatcaatgagcatttgccctggatgattgtgcttttcctgctgctggtgcttgtggtgattgtggtgtgcagtatccggaaaagctcgaggactctgaaaaaggggccccggcaggatcccagtgccattgtggaaaaggcagggctgaagaaatccatgactccaacccagaaccgggagaaatggatctactactgcaatggccatggtatcgatatcctgaagcttgtagcagcccaagtgggaagccagtggaaagatatctatcagtttctttgcaatgccagtgagagggaggttgctgctttctccaatgggtacacagccgaccacgagcgggcctacgcagctctgcagcactggaccatccggggccccgaggccagcctcgcccagctaattagcgccctgcgccagcaccggagaaacgatgttgtggagaagattcgtgggctgatggaagacaccacccagctggaaactgacaaactagctctcccgatgagccccagcccgcttagcccgagccccatccccagccccaacgcgaaacttgagaattccgctctcctgacggtggagccttccccacaggacaagaacaagggcttcttcgtggatgagtcggagccccttctccgctgtgactctacatccagcggctcctccgcgctgagcaggaacggttcctttattaccaaagaaaagaaggacacagtgttgcggcaggtacgcctggacccctgtgacttgcagcctatctttgatgacatgctccactttctaaatcctgaggagctgcgggtgattgaagagattccccaggctgaggacaaactagaccggctattcgaaattattggagtcaagagccaggaagccagccagaccctcctggactctgtttatagccatcttcctgacctgctgtagaacatagggatactgcattctggaaattactcaatttagtggcagggtggttttttaattttcttctgtttctgatttttgttgtttggggtgtgtgtgtgtgtttgtgtgtgtgtgtgtgtgtgtgtgtgtgtgtgtgtttaacagagaatatggccagtgcttgagttctttctccttctctctctctcttttttttttaaataactcttctgggaagttggtttataagcctttgccaggtgtaactgttgtgaaatacccaccactaaagttttttaagttccatattttctccattttgccttcttatgtattttcaagattattctgtgcactttaaatttacttaacttaccataaatgcagtgtgacttttcccacacactggattgtgaggctcttaacttcttaaaagtataatggcatcttgtgaatcctataagcagtctttatgtctcttaacattcacacctactttttaaaaacaaatattattactatttttattattgtttgtcctttataaattttcttaaagattaagaaaatttaagaccccattgagttactgtaatgcaattcaactttgagttatcttttaaatatgtcttgtatagttcatattcatggctgaaacttgaccacactattgctgattgtatggttttcacctggacaccgtgtagaatgcttgattacttgtactcttcttatgctaatatgctctgggctggagaaatgaaatcctcaagccatcaggatttgctatttaagtggcttgacaactgggccaccaaagaacttgaacttcaccttttaggatttgagctgttctggaacacattgctgcactttggaaagtcaaaatcaagtgccagtggcgccctttccatagagaatttgcccagctttgctttaaaagatgtcttgttttttatatacacataatcaataggtccaatctgctctcaaggccttggtcctggtgggattccttcaccaattactttaattaaaaatggctgcaactgtaagaacccttgtctgatatatttgcaactatgctcccatttacaaatgtaccttctaatgctcagttgccaggttccaatgcaaaggtggcgtggactccctttgtgtgggtggggtttgtgggtagtggtgaaggaccgatatcagaaaaatgccttcaagtgtactaatttattaataaacattaggtgtttgtt

SEQ ID NO: 49 - DNA, 696 bp, Homo sapiens
atgtcaagttgctggcactgcttacaagaggagcagggtgagagggccatgaaccatgggcagtggcagaagtcgaggaaagccttggcatctccagtcacgttcacagatgacaggtcaaggtcagggtgtgaggctgcagttgagcagaatgatgagaagacaggcccagaggaagatgcaatagtcatggcaaacacccaattattggctcctttgtcctgtgggggcattttgggagattcttcaaagaccctcaatgccagagcctgctgcatcctgccccagcgcctacgtcccaccgctgtcgccgccaccgtgcccaagagaaaggctgaaggtgatgctaaaggagataaagccaaggtgaaggacaaaccacagagaagatccatgaggctgtctgccaaacctgctcctccaaagccagagcccaagcctaaaaatgcccctgcaaagaagggagagaaggtacccaaagggaaaaagggaaagctgatgctggcaaggaggggaataacccagcagaaaatggggatgccaaaagagacgaggcacagaaagctgaaggtactggagatgccaagtgaaatgtgtgcgttttttataactgtgtacttctggtgactgtacaatttgaaatactatttttatcaagttttataaaaatgcagaattttgttttacttttttttt

SEQ ID NO: 50 - DNA, 3638 bp, Homo sapiens
gccccaaccaggaagtctgaattccagtatctgggatggatctgaagttctgaggcgaatccgaggaccactgcttgctcaggaaatgcctacagtgtctgtattagaatatgctttgcctcagaggcccccccagggtccagaagatgatcgggacctttctgaacgagcattaccaaggcggtcaacttcacctatcattggcagtcctcctgttagagctgtccccataggcaccccacctaaacagatggctgtacccagcttcacccaacagattctgtgtccgaagcctgtccatgttcggcccccaatgccacctcgttatcctgctccctatggtgagaggatgtctccaaaccagctctgcagtgtcccgaactcttccctcctgggtcacccttttcctcctagtgttcctcctgttctcagccccctccagagagcacagcttcttggaggagcacagctacagcctggacggatgtctcccagccagtttgcacgggtccctggatttgttggtagtccacttgctgccatgaatcccaagttgctacaagggcgagttgggcagatgcttcccccagcaccaggcttccgtgccttctttagtgctccaccctccgctacaccacctccacagcagcaccctcctggcccaggaccccacctgcaaaacctaagatctcaggccccaatgtttagaccggacacaactcacctccatccacagcaccgtcgactcttgcatcagagacagcaacagaatagaagtcagcatcggaatctcaatggtgcgggagatagaggaagtcaccggagcagtcatcaagatcatctccgaaaggatccatatgccaatctcatgttgcagcgggaaaaggattgggtctctaaaatccagatgatgcaactgcaaagcactgatccctacctggatgatttttattaccagaattactttgaaaaactggagaaactgtcagctgctgaagaaatacaaggtgatggccctaagaaggagcgcaccaagcttatcacccctcaggtggccaaactggagcacgcctataagccagtgcaatttgagggctctttgggaaagcttaccgtttctagtgtgaataatccccgaaaaatgattgatgctgttgtgacatctcggagtgaggatgatgagacaaaagaaaaacaagttcgagacaagaggagaaaaacccttgttataattgagaaaacctacagcttactccttgatgtggaggactatgaaagacgttatctcctaagtctggaagaagagcgacctgccctaatggatgacagaaagcacaaaatttgtagcatgtatgacaacttaagggggaaattgcctggacaagagaggcctagtgatgaccactttgtacagatcatgtgtatccgaaaagggaagagaatggttgcccgtattcttcctttcctctccacagagcaagcagctgacattctcatgacaacagccaggaacctccctttccttatcaagaaggatgcacaagatgaggtgctgccatgcttactgagtcccttctctctccttctctatcatcttccatcagtgagtatcaccagccttttgcgacagctaatgaacctacctcaaagtgcagctacaccagcactctccaatcctcacctcactgctgtgctccagaacaagtttggcctgtcactgctcctcatcctcctgagccgtggtgaagacctacagagttcagaccctgctacagaatcaacacaaaataatcagtggacggaggtgatgttcatggcaacacgagaacttctgcggattccccaagcagccctggccaagccaatctctatacctacaaacctagtgtccctcttttctcgctatgttgaccggcagaaactgaacttgctggagacaaaactgcagctagttcaggggatacgataaaagatctccaaatgtgtcctgtacctccttttggctgccacctgcactgctgccatcaccaatggagtgtttttaatgagggaaggaaggtagctttttccccaaagcaaagtcttgtgggatcgattcctgtttacaggggttgtctctctaaatgtcagatatttccccactgctctatgaaatttggctgggtgatacttctgctggtttctttaccttctgtgttacagttctgcatgtcctacttttactcagttctgttttgcattttctttgccctagagacacaagtgtaatctctccctttatccctccactactccacctcagagtagattgtagcctgccaaaggattccttccctcatcctattgaagttgttttttcattgccccatattaatatgactatagaagagccaattaagtagaaatcaagatatacacacacacatagatacacacacacacaccccatacatgtatttatgtggtcttcagagggtccttaaagaatgaattttagattgaaaaatatttagttgtctcattacctcttctaaacacaaaccagctgatgtattttaatctgtttctgttctatcttgtaattaatttggtgggttctacttgttttaacataaataaagagtatgcagcacgtttaataaaatcagaactcttaattggcttatgcccaggtctaggctgagaagtcctttttcttcttcccacctttatttccttagtttctgtccaccttaatcgaaacaacacatggttatgtctttttcctgctacaactacagggtacttgagcctttcccctcaagtgcattcgaagtcacccaggatgatcctcactagtagcctgctttggcagtgtggctttttgcacacttgccctgtcttcctgagactacttcagtaagccatgcttccttcttccccacttttatttggtgtcatgaatagaaacttccaaatgtaaccatggaagctaagtttggcctgctttgctttttagtctccacaccatgggcagaactgctgtctttactacttcatctcacccaagtcccgttcccaggcagccaggggcctgggtttgaataattgcagggccagcctgccatgatctttctcacttactcctctcccattcagcaatcaaccagactaaggagttttgatccctagtgattacagccctgaagaaaattaaatctgaattaattttacatggccttcgtgatctttctgctgttcttactttttcgaatgtagttggggggtgggagggacaggttatggtatttaaagagaataaacattttgcacatacatgtattgtacaacagtaagatcctctgttaaaaccagctgtcctgttctccatctccatttcttcccatgctgtaaccccaggctccaccagctgttccccagtgatgttacctagcttccctctaccgttgtctactgaccatttccactacatgcctttcctaccttcccttcacaaccaatcaagtgaatacttgattattatctcttccttactgtgctttatcttttttgtttggattggttctaattaatgaaaataaaagtttctaaatttacatttttatagggtattgtaaataaaaacaaattgtatactt

SEQ ID NO: 51 - DNA, 5051 bp, Homo sapiens
atgaggggacttgggacttgcctggcgactttggccggacttttgctaactgcggcgggcgagacgttctcaggtggctgcctctttgatgagccgtatagcacatgtggatatagtcaatctgaaggtgatgacttcaattgggagcaagtgaacaccttgactaaaccgacttctgatccatggatgccatcaggttctttcatgctggtgaatgcctctgggagacctgaggggcagagagcccacctgctcttaccccaacttaaagaaaatgacacccactgcatcgattttcactattttgtgtccagcaagagtaattctcctccggggttactcaatgtctacgtgaaggtcaataacgggccactggggaatcctatctggaatatatctggagacccaacacgtacatggaacagggcagaactggccattagtactttctggcctaacttttatcaggtgatttttgaagtgataacttctggacatcaaggctatctcgctatcgatgaggtgaaggtgttaggacatccatgtaccaggactcctcacttcctgcggattcagaatgtggaagttaatgctggccagtttgctaccttccagtgcagtgccatcggcaggaccgtggcaggagacaggctctggttacagggcattgatgtgcgagatgctcctctgaaggaaatcaaggtgaccagctcccgacgcttcattgcttcatttaatgttgtgaataccaccaaacgagatgctggaaagtaccgctgcatgattcgcactgaaggaggtgttggaatatcaaactatgcagagttggtagttaaagaaccacccgttcctattgccccacctcagctcgcctctgtaggagccacctacctgtggatacagctcaacgccaactccatcaatggggatgggcccattgtggcccgagaggtggagtactgcacggccagtgggagctggaatgaccggcagccagtcgattccacgagctataaaattggacaccttgacccagatacagaatatgagattagtgtgctcctgaccaggccaggggagggtggcactggctctcctggtccagctctcaggacaagaacaaagtgtgctgatcccatgcgaggcccaagaaaactagaagtagtggaggtcaaatctcggcaaatcactatccgctgggagccatttggatataatgtaactcgttgccacagttataatctcactgtccactactgttaccaagttggaggacaagaacaagtgcgagaagaagtaagctgggatacagaaaactcacaccctcaacacacgatcactaacctgtcaccatacaccaatgtcagtgtgaaactgatcctcatgaacccagagggccggaaggaaagccaagaactcatagtgcagacagatgaagacctcccaggtgctgttcccactgaatccatacaaggaagtacctttgaagagaagatatttcttcagtggagagaaccaactcaaacatatggtgtaatcactttatatgagatcacctacaaagcagtcagttcctttgacccagaaatagatttatccaatcagagtggaagagtttcaaagctgggaaatgaaacccattttctgttttttggactgtatccggggaccacatactcctttaccatccgagctagcacagctaagggttttgggcctccagcaacaaaccagttcaccaccaaaatatcagcaccctctatgccagcttatgaacttgagacacctttgaatcaaactgacaataccgtgacagtcatgctgaaacctgcccacagcagaggagcacctgtcagtgtctatcaaatagttgttgaggaagaacgtcctcgaagaactaaaaagacgacagaaatcttaaagtgctacccagtgccaattcacttccagaatgcttctctgctgaactcacagtactactttgctgcagaatttcctgcagacagcctccaagctgcgcagccttttacaattggtgataataagacatataatggatactggaacactccccttctcccctataaaagctacagaatttatttccaagctgctagtagagccaatggggaaaccaaaatagactgtgtccaagtggccacaaaaggagctgccactccgaaaccagtcccagaacccgagaaacagacagaccatacagttaaaattgctggagtcatcgcgggcatcttgctgttcgtgattatatttcttggagttgtgttggtaatgaagaaaaggaaactggccaagaagcggaaagagaccatgagcagcacccgacaggagatgactgtgatggtgaactcaatggacaagagctatgctgagcagggcacaaactgcgacgaggctttctcattcatggacacgcacaatctgaatgggagatctgtgtcttcaccatcgtccttcacaatgaaaacaaatacactgagcacatcggtgcctaattcctattacccagatgaaacccacacaatggccagcgataccagcagcctggtgcagtcccatacttacaagaagcgagagccggccgacgtgccctatcagactgggcagctccaccccgccatccgggtggcagacctccttcagcacatcacacagatgaagtgtgcggagggctacggcttcaaggaggaatacgagagcttctttgaagggcagtctgcaccatgggactcggctaagaaagatgagaacagaatgaagaacagatacgggaatatcattgcatacgatcattcccgagtgaggctgcagacaatagaaggagacacaaactcagactatatcaatggcaattatatcgatggttatcatcgacccaatcattacattgctacccaagggccaatgcaggaaaccatctatgacttctggaggatggtgtggcacgaaaacactgcaagtatcatcatggtgaccaatcttgtggaagtgggaagggtcaaatgctgcaaatactggccagatgacacagagatatataaagacattaaagttaccctaatagaaacagaactactggcagaatatgtgataagaacatttgctgttgaaaagagaggtgtgcatgaaatccgagagatcagacagtttcacttcactggctggccggatcatggggtcccctaccatgccaccggcctgctgggattcgtgcggcaagtcaagtccaagagcccgcccagtgcaggcccactggtggtgcactgcagtgctggtgcagggaggactggctgtttcatcgtcattgatatcatgttggacatggccgaaagggaaggggtcgtagacatctacaactgcgtcagggagctgcggtcacggagggtgaacatggtgcaaacagaggagcagtatgtgtttatccacgatgcgatcctggaagcctgtctttgtggggacacctctgtgcctgcttcccaagttaggtctctgtattatgacatgaacaaactggatccacagacaaactcaagccagattaaagaggaattccggacgctaaacatggtgacaccaacgctgcgagtagaggactgcagcatcgcactgttgccccggaaccatgagaaaaaccggtgcatggacatcctgcccccagaccgctgcctgcccttcctcatcaccatcgatggggagagcagcaactacatcaatgctgccctcatggacagctataaacagccttcagcttttatagtcacccagcatcctttgccaaacacagtgaaagacttttggagactggtcctggattatcactgcacatccgtagttatgctaaatgatgtggatcctgcccagttgtgtccacagtactggccagaaaacggagtacacagacacggccccatccaggtggaatttgtctctgctgacctggaagaggacatcatcagcaggatattccgcatttacaatgccgccagaccccaagatggatatcggatggtgcagcaattccagttcctgggctggccgatgtacagggacacaccagtgtctaagcgctccttcttgaagctcattcgccaggtggacaagtggcaagaggagtacaatggcggggaaggccgcacggttgtgcactgcttgaacgggggaggccgcagtgggacgttctgcgccatcagcatcgtatgtgagatgctccggcaccagagaaccgtggatgtctttcacgctgtgaagacactgaggaacaacaagcccaacatggtcgacctcctggatcagtacaagttctgctacgaggtggccctggaatacttgaattctggctgatggtgtaaacagctctgcaaacaatccctttcataccacaaagccaagacgttccatggtatttgtgcaaaagagatgaagacttctcaatatgcttattttgctttgcataattggctctttttaagagcccaagaaagtgtttctaaaattgcttgcactgcccaatcccagtaatgctgctgcctgacagaaacacacacacagccacagttgccaaatcccgtactccttgccaccggcttcctagagcagcgtagacagctggtaaactgaagagcacaactatattcttatgaaggaatttgtacctttggggtattattttgtggcccgtgaccctcgttattgttacagctgagtgtatgtttttgttctgtggagaatgctatctggcattatggtaatatattattttaggtaatatttgtactttaacatgttgcataatatatgcttatgtagctttccaggactaacagataaatgtgtaatgaacaaagatatgttgtatgagtcgtcgtttctgtcagatttgtattgtttccaagggaaaagcttgggggaggactcagttcacaaaatgcaaaactcaacgatcagattcacggacccagagcttttccatgtgtttatattgtaaatatttttgatttcatcaaattatttattcattaaaagaaatttttgtg

SEQ ID NO: 52 - DNA, 6369 bp, Homo sapiens
gtggaatgacgggagggagtcccggcagctcctacctcccagcgatggcgtcgctgtgccgcgcccagtccccagcctgccggccggtactcaccgctacccggagttcgctcagacggtgagatttggggcgggtccgaggcagcggcgggacgctacctgcgaccgggaccatgaggagctgccagacccgtggggccggtaacgagagcagtcgcggcacctgctgagaggaaagagggagcggtccggcgcggctggggcgcggcagaggcttgcccgatcctcggccatgtcactgctctgcgtgcgcgttaaaagggccaaattccagggttcaccagataaatttaacacatatgtgaccctgaaagtacagaatgtgaagagcacaactgtagcagttcgtggtgatcagccttcctgggaacaggatttcatgtttgagattagtcgcctggacctgggtctaagtgtggaggtatggaacaaaggactgatctgggacaccatggtggggactgtgtggattgcgctgaagactattcgtcagtcggatgaggaagggcctggggaatggtccacattagaggcagagacgttaatgaaagacgatgagatctgtggaactagaaacccaactcctcataaaattttgcttgatacaagatttgagttgccttttgatatcccagaggaggaagccagatattggacctacaaatgggagcaaatcaatgccttgggagctgacaatgagtattctagtcaagaagaaagccagaggaagccattgcccactgctgccgcccagtgttcttttgaagaccctgatagtgccgtcgatgaccgagatagtgactatcgcagtgagaccagcaacagcttcccacctccttaccatacagcttcccagcccaacgcttctgtgcaccagttccctgtgccggtgcgatcgccacagcagctgctacttcaaggcagttcccgggactcttgtaatgactctatgcaaagttatgaccttgattatccagagcggcgggctatcagccccaccagcagcagtaggtatggctcctcctgtaatgtgagtcaaggaagctctcagctaagtgaactagaccagtatcacgaacaagatgacgaccatcgggagacggactcgattcattcttgccacagctctcacagcctgtccagagatggccaagcaggttttggagaacaagagaaacccttggaggtgacaggtcaagcagagaaggaggcagcatgtgaacccaaggagatgaaagaagatgccacaacccaccctcccccagatctggtgctgcaaaaagaccacttcctaggtccccaggagagttttcctgaggagaatgcatcttcaccatttacccaagccagagcacattggatccgagcagttaccaaggttcgactccagctgcaggagattccagatgatggtgacccctctctgcctcagtggctcccggaagggccagccggagggctctatggcattgacagcatgccagatttacgcagaaagaagccactgccacttgtcagtgatctgtcactggtccagtctcggaaggcaggaatcacttctgcaatggctacacgcacttctcttaaggacgaagagctgaaatcccacgtgtataagaaaaccctgcaggccttaatctaccccatttcgtgcaccactcctcataactttgaggtctggacggccactaccccaacctactgctatgagtgtgaaggcctgctctggggcattgcccggcagggcatgcgctgcagcgaatgtggagtcaagtgccatgagaagtgccaggatctgctcaatgctgactgcctgcagcgggctgcagaaaagagctgtaaacatggagctgaggaccggacccagaacattatcatggccatgaaggaccgcatgaagatccgagagcgaaataagccagagatctttgaagttatccgggacgtcttcacagtgaacaaagctgcccatgtgcagcagatgaaaacagtgaagcagagtgtactggatggcacctccaaatggtcagccaagatcaccattactgtggtgtgtgcccagggcctacaagccaaggacaaaacaggatccagtgacccttacgtgactgtgcaagtcagcaaaactaagaagcgtaccaagaccatttttggaaacttgaatcctgtttgggaggagaagttccattttgagtgccacaactcctctgaccgcattaaggtgcgtgtatgggatgaggatgatgacatcaagtcaagagtaaagcaacgcctaaagcgagagtctgatgatttccttggccaaaccatcattgaggttcggaccctaagtggcgagatggacgtctggtacaacttggagaagaggacagacaaatcagccgtctcaggggctatccgactacaaatcagtgtggagatcaagggggaggagaaagtagccccataccacgtgcagtatacatgtctccatgagaatcttttccattacctcacagacattcagggcagtggaggagtccgcatccctgaagctcgaggagacgatgcctggaaggtgtactttgatgagacagcccaagaaattgtggatgaatttgccatgcgttatggcattgagtccatatatcaggccatgacgcactttgcatgtttatcatccaagtacatgtgtcctggtgtgccagcagtgatgagcaccttactggccaacatcaacgcctactatgcccacacaactgcctctaccaatgtctctgcatctgatcgctttgcagcctccaactttgggaaagagagatttgtaaaactgctggaccagctacacaactcactgaggatcgacctctctacatacaggaataatttccctgctgggagtcctgaacggcttcaggacttaaaatccacagtggatttgctgaccagcattactttcttcagaatgaaggtacaagaactgcaaagccctccaagagccagccaggtggtaaaggattgtgtgaaggcctgtttgaactccacatatgaatatatcttcaacaactgccacgacttatacagccgccagtaccagctgaagcaggagctacctccagaggaacaagggcccagcattcggaacctggatttctggcccaagctcatcacactcatcgtgtcaatcatagaggaagataagaattcctacacacctgttctgaaccagtttcctcaggagttgaatgtgggaaaagtcagcgcagaagtgatgtggcatttgtttgcccaagacatgaaatatgcattggaggagcatgagaaagaccacctgtgtaaaagtgctgactacatgaacctgcacttcaaggtgaagtggctccacaatgaatacgtgcgggatctgcctgtcctccaggggcaggtgcctgagtacccagcgtggtttgagcagttcgtgctacaatggctggatgagaatgaggatgtatccctggaattcctgcgtggggccctggaacgagataagaaggatggattccagcagacatcagagcatgcactcttttcctgctctgtggtggatgtcttcacacaactcaatcagagctttgagatcatccggaagctggaatgcccagaccccagcatccttgcccactacatgaggaggtttgctaagaccatcgggaaggtgctgatgcagtatgcagacatcttgtcaaaggacttcccagcctattgcacaaaggagaaactgccctgcatcctgatgaacaacgtgcagcaactgagggtccagctggagaaaatgtttgaggccatgggaggcaaggagctggaccttgaagctgcagacagtctgaaggagctgcaggtgaaactgaatacggttctggatgagctcagcatggtgtttggaaacagtttccaggtacggattgatgagtgtgttcgacaaatggccgacatcctgggccaggttcggggcacagggaatgcatctccagacgccagggcctcagcggctcaggatgcagatagcgtactccggcctctcatggacttcctggatggcaacctcaccctctttgccactgtgtgtgagaagacggttctgaagcgtgtactgaaggagctctggcgcgtggtgatgaacacaatggagaggatgattgttctgcccccactcactgaccagacgggcacccagctgatcttcactgctgccaaggagctgagccatctttccaaactcaaggatcacatggtacgagaggaaacacggaatctcactccaaagcagtgtgcagtccttgacctcgccctggacaccatcaagcaatacttccatgcaggaggcaatgggctgaagaaaaccttcctggagaagagcccagatctgcagtctctacgctatgccctgtctctgtacacacagactactgacactctcatcaagacctttgtgcgctcgcagaccacccaagggtctggtgtggacgatcctgtgggagaagtctctattcaggtggacttgtttacacaccctggtactggggagcacaaggtcacagtgaaagtggtggctgccaatgacctcaagtggcagacagcgggtatgttccggcctttcgtggaggtgactatggttggcccacaccaaagtgataagaagaggaagttcacaaccaaatccaaaagcaacaactgggcccccaagtacaatgagacattccacttcctcctgggaaatgaggaggggcccgagtcctatgagttgcagatatgcgtgaaggattactgctttgcccgggaagatcgcgtgctagggctggctgtgatgcctctgagggatgtcacagccaagggcagctgtgcctgctggtgccccttgggccggaagatccatatggatgagacaggcctgaccattctccggattttatctcagaggagcaatgacgaggtggcccgagaatttgtgaaactcaaatcagagtctcgttccacggaggaggggagctgaacaccttcgactcctgtgccaatcaggcagcagcaatttcacaaatcagggccagtgggagttagctgtgtaaccggcttagggtctttgcagtcaagaggctgaccccttcagttaaagatatttaaggaaaaatttggggtggtgataatatggcttttcacagaaagggtcatgaagccctggcccaacaggactgtggtactaggggctgggatgtggggttaccacatggagagattttccattaagagagaaggacaaacatttctgagagtgtcagccattcttggtagacacctctccactcctcatcccacctctacccatctccatgccacaccttatccagttagacacatacataccaatcattagaagaacaagtttagaaggtgtggaacttgtgcctggctggctgggtagtcagctgagcctgttgctgagcccggtggtctggattggagtatggccagggcaggagtacacagaatagaatttagactgtcccttgagtagaatccactgattttctgtggctccagtgagaacaaggctttgaaactgaacaagataacttctagaaatgaactgtactaatccctttccccagattgtatcatgagtagaatcaggttcacgtggtgcttcaaagccctgagaagaatatttctttggaccccaggcactaggggccacctgcctgggagtctccctgcctcactcctctaggcaggggagtgatgcttcaggacgtgacaggctgttctaacatgtgtctacctgagggctagttgaaggatccaggagtattttcttcttgggtgggccctgaacaaagccaaaaattgtagaaaccagtctagaaaaagtcctgctcatctgtggccactgccttctagccgtcctccaccttgcagaaagaatctagcctttggtctctctctctctcatcggggtcatttgctattcccctctgatattcaaccctatagaaggagcctggactctgatccctctgtacaggctggatggaaggggccctccacacttcctgggaggtcagagacaaactgtttcagagagtcagatggacttcccaagacttgttgagagatgtgacatggttcttggatttcctctgtagcagcctcctggacttcctgaggactcgacattgtccacagatgtactggccattacatgaaacaagaaaccaagcatctttgctgttgttaattattatatgtgccattgttacaggagattataggctagtctgtaataaattatcttatagc

SEQ ID NO: 53 - DNA, 3623 bp, Homo sapiens
actcactgcccgggccgcccggacagggagcttcgctggcgcgcttggccggcgacaggacaggttcgggacgtccatctgtccatccgtccggagagaaattacagatccgcagccccgggatggggccggccccgctgccgctgctgctgggcctcttcctccccgcgctctggcgtagagctatcactgaggcaagggaagaagccaagccttacccgctattcccgggaccttttccagggagcctgcaaactgaccacacaccgctgttatcccttcctcacgccagtgggtaccagcctgccttgatgttttcaccaacccagcctggaagaccacatacaggaaacgtagccattccccaggtgacctctgtcgaatcaaagcccctaccgcctcttgccttcaaacacacagttggacacataatactttctgaacataaaggtgtcaaatttaattgctcaatcagtgtacctaatatataccaggacaccacaatttcttggtggaaagatgggaaggaattgcttggggcacatcatgcaattacacagttttatccagatgatgaagttacagcaataatcgcttccttcagcataaccagtgtgcagcgttcagacaatgggtcgtatatctgtaagatgaaaataaacaatgaagagatcgtgtctgatcccatctacatcgaagtacaaggacttcctcactttactaagcagcctgagagcatgaatgtcaccagaaacacagccttcaacctcacctgtcaggctgtgggcccgcctgagcccgtcaacattttctgggttcaaaacagtagccgtgttaacgaacagcctgaaaaatccccctccgtgctaactgttccaggcctgacggagatggcggtcttcagttgtgaggcccacaatgacaaagggctgaccgtgtccaagggagtgcagatcaacatcaaagcaattccctccccaccaactgaagtcagcatccgtaacagcactgcacacagcattctgatctcctgggttcctggttttgatggatactccccgttcaggaattgcagcattcaggtcaaggaagctgatccgctgagtaatggctcagtcatgatttttaacacctctgccttaccacatctgtaccaaatcaagcagctgcaagccctggctaattacagcattggtgtttcctgcatgaatgaaataggctggtctgcagtgagcccttggattctagccagcacgactgaaggagccccatcagtagcacctttaaatgtcactgtgtttctgaatgaatctagtgataatgtggacatcagatggatgaagcctccgactaagcagcaggatggagaactggtgggctaccggatatcccacgtgtggcagagtgcagggatttccaaagagctcttggaggaagttggccagaatggcagccgagctcggatctctgttcaagtccacaatgctacgtgcacagtgaggattgcagccgtcaccagagggggagttgggcccttcagtgatccagtgaaaatatttatccctgcacacggttgggtagattatgccccctcttcaactccggcgcctggcaacgcagatcctgtgctcatcatctttggctgcttttgtggatttattttgattgggttgattttatacatctccttggccatcagaaaaagagtccaggagacaaagtttgggaatgcattcacagaggaggattctgaattagtggtgaattatatagcaaagaaatccttctgtcggcgagccattgaacttaccttacatagcttgggagtcagtgaggaactacaaaataaactagaagatgttgtgattgacaggaatcttctaattcttggaaaaattctgggtgaaggagagtttgggtctgtaatggaaggaaatcttaagcaggaagatgggacctctctgaaagtggcagtgaagaccatgaagttggacaactcttcacagcgggagatcgaggagtttctcagtgaggcagcgtgcatgaaagacttcagccacccaaatgtcattcgacttctaggtgtgtgtatagaaatgagctctcaaggcatcccaaagcccatggtaattttacccttcatgaaatacggggacctgcatacttacttactttattcccgattggagacaggaccaaagcatattcctctgcagacactattgaagttcatggtggatattgccctgggaatggagtatctgagcaacaggaattttcttcatcgagatttagctgctcgaaactgcatgttgcgagatgacatgactgtctgtgttgcggacttcggcctctctaagaagatttacagtggcgattattaccgccaaggccgcattgctaagatgcctgttaaatggatcgccatagaaagtcttgcagaccgagtctacacaagtaaaagtgatgtgtgggcatttggcgtgaccatgtgggaaatagctacgcggggaatgactccctatcctggggtccagaaccatgagatgtatgactatcttctccatggccacaggttgaagcagcccgaagactgcctggatgaactgtatgaaataatgtactcttgctggagaaccgatcccttagaccgccccaccttttcagtattgaggctgcagctagaaaaactcttagaaagtttgcctgacgttcggaaccaagcagacgttatttacgtcaatacacagttgctggagagctctgagggcctggcccagggctccacccttgctccactggacttgaacatcgaccctgactctataattgcctcctgcactccccgcgctgccatcagtgtggtcacagcagaagttcatgacagcaaacctcatgaaggacggtacatcctgaatgggggcagtgaggaatgggaagatctgacttctgccccctctgctgcagtcacagctgaaaagaacagtgttttaccgggggagagacttgttaggaatggggtctcctggtcccattcgagcatgctgcccttgggaagctcattgcccgatgaacttttgtttgctgacgactcctcagaaggctcagaagtcctgatgtgaggagaggtgcggggagacattccaaaaatcaagccaattcttctgctgtaggagaatccaattgtacctgatgtttttggtatttgtcttccttaccaagtgaactccatggccccaaagcaccagatgaatgttgttaagtaagctgtcattaaaaatacataatatatatttatttaaagagaaaaaatatgtgtatatcatggaaaaagacaaggatattttaataaaacattacttatttcatttcacttatcttgcatatcttaaaattaagcttcagctgctccttgatattaacatttgtacagagttgaagttgttttttcaagttcttttctttttcatgactattaaatgtaaaaatatttgtaaaatgaaatgccatatttgacttggcttctggtcttgatgtatttgataagaatgattcattcaatgtttaaagttgtataactgattaattttctgatatggcttcctaataaaatatgaataagg

SEQ ID NO: 54 - DNA, 3472 bp, Homo sapiens
gccaagaagcttgagagaagaaaaatttcagaaaaattgtctcaatttgactagaatatcaatgaaccaggaaaactgaagcaccttccctaaagaaaacttgggtatacaattactccacagacagagctgagggttttttacccaaatcagtcactggattttgctgcctgatacgtgaatcttcttggaatttttctcatgtggatctaaggggaatgctttattatggctgctgttgtccaacagaacgacctagtatttgaatttgctagtaacgtcatggaggatgaacgacagcttggtgatccagctatttttcctgccgtaattgtggaacatgttcctggtgctgatattctcaatagttatgccggtctagcctgtgtggaagagcccaatgacatgattactgagagttcactggatgttgctgaagaagaaatcatagacgatgatgatgatgacatcacccttacagttgaagcttcttgtcatgacggggatgaaacaattgaaactattgaggctgctgaggcactcctcaatatggattcccctggccctatgctggatgaaaaacgaataaataataatatatttagttcacctgaagatgacatggttgttgccccagtcacccatgtgtccgtcacattagatgggattcctgaagtgatggaaacacagcaggtgcaagaaaaatatgcagactcaccgggagcctcatcaccagaacagcctaagaggaaaaaaggaagaaaaactaaaccaccacgaccagattccccagccactacgccaaatatatctgtgaagaagaaaaacaaagatggaaagggaaacacaatttatctttgggagtttttactggcactgctccaggacaaggctacttgtcctaaatacatcaagtggacccagcgagagaaaggcatttttaaattggtggattctaaagcagtgtccaggttgtgggggaagcacaaaaacaaacctgatatgaattatgagaccatgggaagagcactcaggtactattaccaaaggggtattctggcaaaagtggaaggtcagcgcttggtgtatcagtttaaagaaatgccaaaagatcttatatatataaatgatgaggatccaagttccagcatagagtcttcagatccatcgctatcttcatcagccacttcaaataggaatcaaaccagccggtcgagagtatcttcaagtccaggggtaaaaggaggagccactacagttctaaaaccagggaattctaaagctgcaaaacccaaagatcctgtggaagttgcacaaccatcagaagttttgaggacagtgcagcccacgcagtctccatatcctacccagctcttccggactgttcatgtagtacagccagtacaggctgtcccagagggagaagcagctagaaccagtaccatgcaggatgaaacattaaattcttccgttcagagtattaggactatacaggctccaacccaagttccagtggttgtgtctcctaggaatcagcagttgcatacagtaacactccaaacagtgccactcacaacagttatagccagcacagatccatcagcaggtactggatctcagaagtttattttacaagccattccatcatcacagcccatgacagtactgaaagaaaatgtcatgctgcagtcacaaaaggcgggctctcctccttcaattgtcttgggccctgcccaggttcagcaggtccttactagcaatgttcagaccatttgcaatggaaccgtcagtgtggcttcctctccatccttcagtgctactgcacctgtggtgaccttttctcctcgcagttcacagctggttgctcacccacctggcactgtaatcacttcagttatcaaaactcaagaaacaaaaactcttacacaggaagtagagaaaaaggaatctgaagatcatttgaaagagaacactgagaaaacggagcagcagccacagccttatgtgatggtagtgtccagttccaatggatttacttctcaggtagctatgaaacaaaacgaactgctggaacccaactctttttagttaatataccaaagcttatgaataattgtttgttaattgaacattttcaattatatgcagactgactgattctaagataaattctaaggaggtttctaattttgtaattgttaaaaatagagttaattttgactttgttagatgagggaggaaaactcaactgtttctctttgttatctaaatgtttcagaattcaatcgtgaaggaacaggcattttacactatgaagacattcttttgagatttttatttcagttgctatatcataagcatttttaaagtttcttttctaattttacattgtattagattttctgattcttttgtaaatacagaacttaaatagaaggcaacaggaaatttatataggaactattttcattccacttgtgtaagttaagtcttgactctttcaaatgcaaaaaacctattttatgctttgttaaaattatggtgtcacttagattgactttagttgactgcactatataatatagaactatgaatatgtagaataacatgaaaaattggaggtgctggtggtatggctgaccctgtttcagaagcaggatagtataaaagcatcagcctaagaatggcactcccactaactagctatgtaatcttgacctctttgggctttagttcctctcataaaaggaagagatgtattggattagactagatgatcaccactttctcttctagttctaatttttttaattctaatacctatattttcaagttatgtcaattaaatcattatcaggttatttcctaatgtaagaatagctaaaatgttgcagagaaataagtgacccaacaaaatttattcatctgttatgggtaagatctgccataaattcttcctaaataatttgtttactaactctttaggccactgtgctttgcggtccattagtaaacttgtgttgctaagtgctaaacagaatactgctattttgagagagtcaagactctttcttaagggccaagaaagcaacttgagccttgggctaatctggctgagtagtcagttataaaagcataattgctttatattttggatcattttttactgggggcggacttggggggggttgcatacaaagataacatatatatccaactttctgaaatgaaatgtttttagattactttttcaactgtaaataatgtacatttaatgtcacaagaaaaaaatgtcttctgcaaattttctagtataacagaaatttttgtagatgaaaaaaatcattatgtttagaggtctaatgctatgttttcatattacagagtgaatttgtatttaaacaaaaatttaaattttggaatcctctaaacatttttgtatctttaattggtttattattaaataaatcat

SEQ ID NO: 55 - DNA, 1305 bp, Homo sapiens
acgagggagcttgtgctcacgcagaccgggcagtgcgggaaccagatcggcgccaagttctgggaggtgatctctgatgaacatgccatcgactccgctggcacctaccacggggacagccacctgcagctggagcgcatcaacgtgcaccaccacgaggccagcggtggcaggtacgtgtcccgcgctgtgctcgtggatctggagccgggcaccatggactctgtgcgctcggggcccttcgggcaggtcttcaggccagacaacttcatttcccgtcagtgtggggccggaaacaactgggccaagggacgctacaccgaaggcgcggagctgacggagtcagtgatggacgttgtcagaaaggaggctgagagctgtgactgcctgcagggtttccagctgacccactccctgggtggggggactgggtctgggatgggtacccttctcattagtaagatctgggaggagtacccagacaggattataaacacattgagcatcctgctcttgcccaaggtgtcagacaccgtggtggagccctacaacgccaccctctcagtccaccagctcatagaaaacgcagatgagaccttctgcatagataacgaagcgctatatgacatatgttccaggaccctaaaactgcccacacccacctatggtgacctgaaccacctggtgtctgctaccatgagtggggtcaccacgtgcctgtgcttccccgaccagctgaatgctgacctgcggaagctggccatgaacatggtcccgtttccccggctgcatttcttcatgcccggctttgccccactgaccagccggggcagccagcagtaccgggccttgactgtggctgagctcacccagcagatgtttgatgctaagaacatgatggctgcccgtgacccccgtcacggccgctacctaacggcggctgccattttccagggtcgcatgcccatgagggaggtggatgaacagatgttcaacattcaagataagaacagcagctactttgctgactggttccccaacaacgtaaaaacagccgtctgtgacatcccaccctgggggctaaaaatgtcagtcaccttcactgggaacaacacagccgtccaggaactcaagcgggtctcagagcagtttacagcaacgttcaggcgcaaggccttcctccactggtacacgggcgagggcatggatgagatggaattcactgaggccgagagcaacatgaacgacttggtgtctgaatatcagcaatatcaggatgccacggccgagggaggaggagtatga

SEQ ID NO: 56 - DNA, 1768 bp, Homo sapiens
gaacttgcgcgggagccggactgagcggtgcgagcgcgcaggcgcggccgacggggcgggctgctactccggaatctgctaatcccagtcggtgccgcatccccagcccgccgccatggccgcctacaaactggtgctgatccggcacggcgagagcgcatggaacctggagaaccgcttcagcggctggtacgacgccgacctgagcccggcgggccacgaggaggcgaagcgcggcgggcaggcgctacgagatgctggctatgagtttgacatctgcttcacctcagtgcagaagagagcgatccggaccctctggacagtgctagatgccattgatcagatgtggctgccagtggtgaggacttggcgcctcaatgagcggcactatgggggtctaaccggtctcaataaagcagaaactgctgcaaagcatggtgaggcccaggtgaagatctggaggcgctcctatgatgtcccaccacctccgatggagcccgaccatcctttctacagcaacatcagtaaggatcgcaggtatgcagacctcacagaagatcagctaccctcctgtgagagtctgaaggatactattgccagagctctgcccttctggaatgaagaaatagttccccagatcaaggaggggaaacgtgtactgattgcagcccatggcaacagcctccggggcattgtcaagcatctggagggtctctctgaagaggctatcatggagctgaacctgccgactggtattcccattgtctatgaattggacaagaacttgaagcctatcaagcccatgcagtttctgggggatgaagagacggtgcgcaaagccatggaagctgtggctgcccagggcaaggccaagaagtgaaggccggcggggaggatactgtccccaggagcaccctccctgcccgtcttgtccctctgcccctcccacctgcacatgtcacactgaccacatctgtagacatcttgagttgtagctgcagacggggaccagtggctcccattttcattttagccattttgtcgcctgcacccactcccttcatacaatctagtcagaatagcagttctagagcacaggttctcagtctaagctatggaaaagctccccttatccaacagagtttaaaagtagtgacttgggtttttgcgagtgctttgtttactaaggactttggggaggaaccatgctaagccatgaccagtgaggagaagcaacagagcctgtctgtccccatgagcggagtctgtcctctgctcttctgcagtcaggtcactgcctactgcctgggggctctagtcattccagtggaagacgaatgtaacctgcgtggtgatgtgacaactgtttcctccctgaccccagaggatctggctctaggttgggatcaatcctgaatttcgttatgtgttaatttacttttattaaaaaagtatagtatatataatacaaaacaataacccttctggggtttcttgtggcggttgaaatagtcccacatgtggtcatcagaaaataagccattcctcataccaatataggatcagctccttgacctctgaggggcaggagtgcttcctggtgtgtgtattagaatcccttcctgccttgtttcatggcagtgaaatgcctcttggtcctgtccaagtgtatctttcactgatttctgaatcatgttctagttgcttgaccctgccacatgggtccagtgttcatctgagcataactgtactaaatcctttttccata

SEQ ID NO: 57 - DNA, 2836 bp, Homo sapiens
agccaatgggagttcaggaggcggagcgcctgtgggagccctggagggaactttcccagtccccgaggcggatcgggtgttgcatccatggagcgagctgagagctcgagtacagaacctgctaaggccatcaaacctattgatcggaagtcagtccatcagatttgctctgggcaggtggtactgagtctaagcactgcggtaaaggagttagtagaaaacagtctggatgctggtgccactaatattgatctaaagcttaaggactatggagtggatcttattgaagtttcagacaatggatgtggggtagaagaagaaaacttcgaaggcttaactctgaaacatcacacatctaagattcaagagtttgccgacctaactcaggttgaaacttttggctttcggggggaagctctgagctcactttgtgcactgagcgatgtcaccatttctacctgccacgcatcggcgaaggttggaactcgactgatgtttgatcacaatgggaaaattatccagaaaaccccctacccccgccccagagggaccacagtcagcgtgcagcagttattttccacactacctgtgcgccataaggaatttcaaaggaatattaagaaggagtatgccaaaatggtccaggtcttacatgcatactgtatcatttcagcaggcatccgtgtaagttgcaccaatcagcttggacaaggaaaacgacagcctgtggtatgcacaggtggaagccccagcataaaggaaaatatcggctctgtgtttgggcagaagcagttgcaaagcctcattccttttgttcagctgccccctagtgactccgtgtgtgaagagtacggtttgagctgttccgatgctctgcataatcttttttacatctcaggtttcatttcacaatgcacgcatggagttggaaggagttcaacagacagacagtttttctttatcaaccggcggccttgtgacccagcaaaggtctgcagactcgtgaatgaggtctaccacatgtataatcgacaccagtatccatttgttgttcttaacatttctgttgattcagaatgcgttgatatcaatgttactccagataaaaggcaaattttgctacaagaggaaaagcttttgttggcagttttaaagacctctttgataggaatgtttgatagtgatgtcaacaagctaaatgtcagtcagcagccactgctggatgttgaaggtaacttaataaaaatgcatgcagcggatttggaaaagcccatggtagaaaagcaggatcaatccccttcattaaggactggagaagaaaaaaaagacgtgtccatttccagactgcgagaggccttttctcttcgtcacacaacagagaacaagcctcacagcccaaagactccagaaccaagaaggagccctctaggacagaaaaggggtatgctgtcttctagcacttcaggtgccatctctgacaaaggcgtcctgagacctcagaaagaggcagtgagttccagtcacggacccagtgaccctacggacagagcggaggtggagaaggactcggggcacggcagcacttccgtggattctgaggggttcagcatcccagacacgggcagtcactgcagcagcgagtatgcggccagctccccaggggacaggggctcgcaggaacatgtggactctcaggagaaagcgcctaaaactgacgactctttttcagatgtggactgccattcaaaccaggaagataccggatgtaaatttcgagttttgcctcagccaactaatctcgcaaccccaaacacaaagcgttttaaaaaagaagaaattctttccagttctgacatttgtcaaaagttagtaaatactcaggacatgtcagcctctcaggttgatgtagctgtgaaaattaataagaaagttgtgcccctggacttttctatgagttctttagctaaacgaataaagcagttacatcatgaagcacagcaaagtgaaggggaacagaattacaggaagtttagggcaaagatttgtcctggagaaaatcaagcagccgaagatgaactaagaaaagagataagtaaaacgatgtttgcagaaatggaaatcattggtcagtttaacctgggatttataataaccaaactgaatgaggatatcttcatagtggaccagcatgccacggacgagaagtataacttcgagatgctgcagcagcacaccgtgctccaggggcagaggctcatagcacctcagactctcaacttaactgctgttaatgaagctgttctgatagaaaatctggaaatatttagaaagaatggctttgattttgttatcgatgaaaatgctccagtcactgaaagggctaaactgatttccttgccaactagtaaaaactggaccttcggaccccaggacgtcgatgaactgatcttcatgctgagcgacagccctggggtcatgtgccggccttcccgagtcaagcagatgtttgcctccagagcctgccggaagtcggtgatgattgggactgctcttaacacaagcgagatgaagaaactgatcacccacatgggggagatggaccacccctggaactgtccccatggaaggccaaccatgagacacatcgccaacctgggtgtcatttctcagaactgaccgtagtcactgtatggaataattggttttatcgcagatttttatgttttgaaagacagagtcttcactaaccttttttgttttaaaatgaacctgctacttaaaaaaaatacacatcacacccatttaaaagtgatcttgagaaccttttcaaaccaga

SEQ ID NO: 58 - DNA, 1860 bp, Homo sapiens
atcactcctagctgctcagcaaaccactgaggttcctgggaaaaaaaaaaaaatatctcaagggtgtgttaacttgggacactcgttaactgggggaccttcttgaggcttttttccttctttttaaaaatcatctttgattattcttcttttctagtaaaataatatttagaaaaaataatgtcagagcacagcagaaattcagatcaagaagaacttctcgatgaggagattaatgaagatgaaatcttggccaacttgtctgctgaagaactgaaagaactgcagtcggaaatggaagtcatggcccctgaccccagccttcccgtgggaatgattcagaaagatcaaactgacaagccaccgacaggaaacttcaatcataaatctcttgttgattatatgtattgggaaaaggcatccaggcgcatgctggaagaggaacgagttcctgtcacctttgtgaaatccgaggaaaagactcaagaagagcatgaagaaatagaaaaacgtaataaaaatatggcccagtatttaaaagaaaagctcaataatgaaatagttgcaaataaaagagaatcaaagggcagcagcaatatccaagaaacagatgaagaagatgaagaagaagaagatgatgatgatgacgacgaaggagaagatgatggtgaagagagtgaagaaacgaacagagaagaggaaggcaaagcaaaggaacaaattagaaattgtgagaacaactgccagcaggtaactgacaaagcattcaaagaacagagagacagaccagaggcccaagaacaaagtgagaaaaaaatatcgaaattagatcctaagaagttagctctagacaccagctttttgaaggtaagtacaaggccttcaggaaaccagacagacctggatgggagcttgaggagagttaggaaaaatgatcctgacatgaaggaactcaacctgaacaacattgaaaacatccccaaagaaatgttactggactttgtcaatgcaatgaagaaaaacaagcacatcaaaacattcagtttagccaatgtgggtgcagatgagaatgtagcatttgccttggctaacatgttgcgtgaaaatagaagcatcaccactctcaacatcgagtccaatttcatcacaggtaaagggattgtggccatcatgaggtgtctccagtttaatgagacgctaactgagcttcggtttcacaatcagaggcacatgttgggtcaccatgctgaaatggaaatagccaggcttttgaaggcaaacaacactctcctgaagatgggctaccattttgagcttccgggtcccagaatggtggtcactaatctgctcaccaggaatcaggataaacaaaggcagaaacgacaggaagagcaaaaacagcagcaactcaaggaacagaagaagctgatagccatgttagagaatgggttggggctgccccctgggatgtgggagctgttgggaggacccaagccagattccagaatgcaggaattcttccagccaccgccacctcggcctcccaacccccaaaatgtcccctttagtcaacgcagtgaaatgatgaaaaagccatcgcaggccccgaagtacaggacagaccctgactccttccgggtggtgaagctgaagagaatccagcgcaaatctcggatgccggaagccagagaaccacccgagaaaaccaacctcaaagatgtcatcaaaacgctcaagccagtgccgagaaacaggccacccccattggtggaaatcactcccagagatcagctgctaaacgacattcgtcacagcagtgtcgcctatcttaaacctgtaacattaccaatagaactaaat

SEQ ID NO: 59 - DNA, 2221 bp, Homo sapiens
tcctacaagcagccggcggcgccgccgagtgaggggacgcggcgcggtggggcggcgcggcccgaggaggcggcggaggaggggccgcccgcggcccccggctcactccggcactccgggccgctcggcccccatgcctgcccgaccgcgctgccggagccccaggtgaccagcgccatgtccagccaggtggtgggcattgagcctctctacatcaaggcagagccggccagccctgacagtccaaagggttcctcggagacagagaccgagcctcctgtggccctggcccctggtccagctcccactcgctgcctcccaggccacaaggaagaggaggatggggagggggctgggcctggcgagcagggcggtgggaagctggtgctcagctccctgcccaagcgcctctgcctggtctgtggggacgtggcctccggctaccactatggtgtggcatcctgtgaggcctgcaaagccttcttcaagaggaccatccaggggagcatcgagtacagctgtccggcctccaacgagtgtgagatcaccaagcggagacgcaaggcctgccaggcctgccgcttcaccaagtgcctgcgggtgggcatgctcaaggagggagtgcgcctggaccgcgtccggggtgggcggcagaagtacaagcggcggccggaggtggacccactgcccttcccgggccccttccctgctgggcccctggcagtcgctggaggcccccggaagacagcagccccagtgaatgcactggtgtctcatctgctggtggttgagcctgagaagctctatgccatgcctgaccccgcaggccctgatgggcacctcccagccgtggctaccctctgtgacctctttgaccgagagattgtggtcaccatcagctgggccaagagcatcccaggcttctcatcgctgtcgctgtctgaccagatgtcagtactgcagagcgtgtggatggaggtgctggtgctgggtgtggcccagcgctcactgccactgcaggatgagctggccttcgctgaggacttagtcctggatgaagagggggcacgggcagctggcctgggggaactgggggctgccctgctgcaactagtgcggcggctgcaggccctgcggctggagcgagaggagtatgttctactaaaggccttggcccttgccaattcagactctgtgcacatcgaagatgccgaggctgtggagcagctgcgagaagctctgcacgaggccctgctggagtatgaagccggccgggctggccccggagggggtgctgagcggcggcgggcgggcaggctgctgctcacgctaccgctcctccgccagacagcgggcaaagtgctggcccatttctatggggtgaagctggagggcaaggtgcccatgcacaagctgttcttggagatgctcgaggccatgatggactgaggcaaggggtgggactggtgggggttctggcaggacctgcctagcatggggtcagccccaagggctggggcggagctggggtctgggcagtgccacagcctgctggcagggccagggcaatgccatcagcccctgggaacaggccccacgccctctcctccccctcctagggggtgtcagaagctgggaacgtgtgtccaggctctgggcacagtgctgccccttgcaagccataacgtgcccccagagtgtagggggccttgcggaagccatagggggctgcacgggatgcgtgggaggcagaaacctatctcagggagggaaggggatggaggccagagtctcccagtgggtgatgcttttgctgctgcttaatcctaccccctcttcaaagcagagtgggacttggagagcaaaggcccatgcccccttcgctcctcctctcatcatttgcattgggcattagtgtccccccttgaagcaataactccaagcagactccagcccctggacccctggggtggccagggcttccccatcagctcccaacgagcctcctcagggggtaggagagcactgcctctatgccctgcagagcaataacactatatttatttttgggtttggccagggaggcgcagggacatggggcaagccagggcccagagcccttgactgtacagagactctattttaatgtatatttgctgcaaagagaaaccgcttttggttttaaacctttaatgagaaaaaaatatataataccgagctc

SEQ ID NO: 60 - DNA, 796 bp, Homo sapiens
atccgcccaggcatgtgcacacacacatgcatatgtgcacgcaccgtgcaggcccgctgtctggcccacaagcgcagccctcctccccaggacacctggcatgttacatgcctccaccatctggcatctccggtccacccctccccggaggaaacaatggggccactgtgacccacacagaattctggtagcctctgaggtcaccacagagataacctcaccaacccctgcaccaagagcacaagtctgtggaggccagccgtgggtgaccgtccttgatcctctttctggccacacagggagagaagcagaaaggcacttcgccactgtctccatcagtgctgttgaactcaaatactgccatgggtggaggccagcagggcagcgtgtccctagcaagacagcgactgggcaacgcacctgtgccaaaccctgccagaagcccagcacgtccaaggtgatcctgagggctgtggcggacaaggggacctgcaagtatgtgtccctggccaccctgaagaaggctgtttccaccacgggctacgacatggcccgaaatgcctatcacttcaagcgtgtgctcaaggggctggtggacaagggctcagcaggctccttcaccctgggcaagaagcaggcctccaagtccaagctcaaggtcaagaggcaacgacagcagaggtggcgctctgggcagcgcccctttggacagcacaggtcactactgggctccaaacaggggcacaagcggcttatcaagggggttcgaagggtggccaagtgccactgcaattaa

SEQ ID NO: 61 - DNA, 3007 bp, Homo sapiens
accgcttggagggagtgtgctctgagttaagctggtctcttctggtcctggaaaaaaatgagtattgacaaggttgctggatctgcgcagaaaagaaagtgccacttaataaaaaatttagcccggcagtggtaccgtctgcagagcttgctgcccttggacgttagcaggaagccttcggggtgctgtaatcggcgggcagaggagagggaggccgcggaattaaaaggaacaaaagctagagcgccatgccaaacgtccccggcaagacccagttaggcaggagccgggagtgatgggaaaatgaactagaacatattggagaattgggagaagtctctttggtttggaaaaaaaaaaaaggaatcttcagcctagatcactttcttatccggactgggatattaaatatacgacacatccaggagtttattggagcgcagactgatggcgcaaaggtacgatgagctgccccattacggcgggatggacggagtaggggttcccgcttccatgtacggagaccctcacgcgccgcggccgatccccccggttcaccacctgaaccacgggccgccgctccacgccacacagcactacggcgcgcacgccccgcaccccaatgtcatgccggccagtatgggatccgctgtcaacgacgccttgaagcgggacaaggacgcgatctatgggcacccgttgtttcctctgttagctctggtctttgagaagtgcgagctggcgacctgcactccccgggaacctggagtggctggcggagacgtctgctcctccgactccttcaacgaggacatcgcggtcttcgccaagcaggttcgcgccgaaaagccacttttttcctcaaatccagagctggacaatttgatgatacaagcaatacaagtactaaggtttcatcttttggagttagaaaaggtccacgaactgtgcgataacttctgccaccgatacattagctgtttgaaggggaaaatgcccatcgacctcgtcattgatgaaagagacggcagctccaagtcagatcatgaagaactttcaggctcctccacaaatctcgctgaccataacccttcttcttggcgagaccacgatgatgcaacctcaacccactcagcaggcaccccagggccctccagtgggggccatgcttcccagagcggagacaacagcagtgagcaaggggatggtttagacaacagtgtagcttcacctggtacaggtgacgatgatgatccggataaggacaaaaaacgccagaagaaaagaggcattttccccaaagtagcaacaaatatcatgagagcatggctcttccagcatctcacacatccgtacccttccgaagagcagaagaaacagttagcgcaagacacaggacttacaattctccaagtaaacaactggtttattaatgccagaagaagaatagtacagcccatgattgaccagtcaaatcgagcagtgagccaaggagcagcatatagtccagagggtcagcccatggggagctttgtgttggatggtcagcaacacatggggatccggcctgcaggtttgcagagcatgccaggggactacgtttctcagggtggtcctatgggaatgagtatggcacagccaagttacactcctccccagatgaccccacaccctactcaattaagacatggacccccaatgcattcatatttgccaagccatccccaccacccagccatgatgatgcacggaggaccccctacccaccctggaatgactatgtcagcacagagccccacaatgttaaattctgtagatcccaatgttggcggacaggttatggacattcatgcccaatagtataagggaactcaagggaaaaggaaacacacgcaaaaactattttaagactttctgaactttgaccagatgttgacacttaatatgaaattccagacagctgtgattattttttacttttgtcatttttcatcaagcaacagaggaccaatgcaacaagaacacaaatgtgaaatcatgggctgactgagacaattctgtccatgtaaagatcctctggaaaaagactccgagagttataactactgtagtataaatataggaactaagttaaacttgtacatttctgttgatcacgccgttatgttgcctcaaatagttttagaagagaaaaaaaaatatatccttgttttccacactatgtgtgttgttcccaaaagaatgactgttttggttcatcagtgaattcaccatccaggagagactgtggtatatattttaaacctgttgggccaatgagaaaagaaccacactggagatcatgatgaacttttggctgaacctcatcactcgaactccagcttcaagaatgtgttttcatgcccggcctttgttcctccataaatgtgtcctttagtttcaaacagatctttatagttcgtgcttcataagccaattcttattattatttttgggggactcttcttcaaagagcttgccaatgaagatttaaagacagagcaggagcttcttccaggagttctgagccttggttgtggacaaaacaatcttaagttgggcagctttcctcaacacaaaaaaaagttattaatggtcattgaaccataactaggactttatcagaaactcaaagcttgggggataaaaaggagcaagagaatactgtaacaaacttcgtacagagttcggtctattaattgtttcatgttagatattctatgtgtttacctcaattgaaaaaaaaaagaatgtttttgctagtatcagatctgctgtggaattggtattgtatgtccatgaattcttcttttctcagcacgtgttcctcactagaagaaaatgctgttacctttaagctttgtcaaatttacattaaaatacttgtatgaggactgtgacgttatgttaaaaaaaaaaaggtgttaagtcacaaaaagcggtaataaatatttcatttttgattttt

SEQ ID NO: 62 - DNA, 2092 bp, Homo sapiens
gccagccacagcagagaggtgggggttgtgaccggagttagatgccagcgcagaagggacgtgagcccagccgaggtaccgctgaagaggaatcaattttggtatgcagataatcactgggctcatgggtcttgctctttacaaagagaattcagcggggtgccaagtcgttttctgtgtgggttgagagacaggctgtgcagcccactgttgcataggactaactactacaaatcatgctgagaccgagctatttttgctgcttagaggctttgcagccttgagaggaattttgttgtcagagaataaaaggaggttgtccataattgactttaagcagcaatcagtaaaacattgagctcttcagctccgcctttcttgctctgaaaattggaaaaccaagaaggttttgatgttttgtgtgacgccacctgaattagaaaccaagatgaacataaccaaaggtggtctggtgttgttttcagcaaactcgaattcatcatgtatggagctatcaaagaaaattgcagagcggctaggggtggagatgggcaaagtgcaggtttaccaggaacctaacagagaaacaagagtacaaattcaagagtctgtgaggggaaaagatgttttcatcatccaaactgtttcgaaggacgtgaacaccaccatcatggagctcctgatcatggtgtatgcatgtaagacctcttgtgccaagagcatcattggcgtgataccctactttccttacagcaagcagtgcaagatgagaaaaagaggctccattgtctctaaattgctggcttccatgatgtgcaaagctggtctaactcatcttattactatggatttacaccagaaggaaattcagggcttcttcaatattcctgttgacaatttaagagcatctcccttcttattacagtatattcaagaagagatcccagattacaggaatgcagtaatcgtggccaagtctccagcctcggcgaagagggcacagtcttttgctgagcgcctgcgcctgggaattgcagtgattcatggagaggcgcaggatgccgagtcggacttggtggatggacggcattccccacccatggtcagaagtgtggctgccatccaccccagcctggagatccccatgctgattcctaaagaaaagcccccaatcacggttgtgggtgatgttggaggaaggattgccatcatcgtggatgacatcattgatgatgttgacagctttcttgctgcagcagagaccctgaaggaaagaggtgcatataagatctttgtgatggcaactcatggcttgttgtcttctgacgccccccggcggattgaagagtctgccattgatgaggtggtggtcaccaatacaattccacatgaagtccagaagctccagtgccccaagattaaaactgtggatatcagcatgatcctttcagaggcgatccgtcggatccacaatggggagtccatgtcctaccttttcagaaacataggcttagatgactgagttttcctttaggaaaactcccgagggccaaactggaaacataagagtgactgctcggtgggatggatttcacaggaaccgtcatgcttgttcctccctctcccctgtaacctcacttcttattgattcctaagaagatagaccaactttttatgtcggtttgggtgtttgtgagtttggggagcaatttttataaaagaaaaactttattctcctcttttgaaaaggtaagacctcgttttagttgtaactgtttaaaaaataacacttggaataagatttgtaagctcacaaagccttcttccaaagttgcttgagccaagtgcttaaaaagttaataaaataaaatgatctgtatgatacctgcaattgaaaagccgaaaagattatactgtcaagtccagtaaatgacatttttagagatgcttttgtagacaagcatatggaatatgtgattgtatttattttctgcaactaaaaaaggaataaaaacttgtgtttgtgtgtttttctaaaactttgtgttttggcaatcgttttataactaaaataaaatgaaagctaaatcta

SEQ ID NO: 63 - DNA, 4769 bp, Homo sapiens
atgacatcacttgagccctgcagacttttcatttacgggaaaacagagaggatgaaggcctatctaaagagcgcagaaggcttttttgtcctaaataaaagtaccacaattggaaggcatgaaaattcagaccttgttttacagtctcctgacatcgacaaccaccatgcactcattgaatataacgaggcggagtgcagctttgttctccaggacttcaattcccgcaacggcacgtttgtcaacgagtgccacattcaaaacgtggctgtgaagctcatccctggagacatcctgagatttgggtctgcagggctgacctatgaactggtcattgaaaatccacctccggtctctttcccatggatgaggggcccagcaccatggccagggccacagccacctcgtgccacacagcagccaaaccaggcccccccaccatcacatatccccttccaccaaggtgtccagccagcaccgatgcaaaggagctggtcccaggcctttcccagacccaccgtggtcctgccggcctcccacaggcggcctgtgagcgccaacaaggagatgttctcgttcgtggtggacgacgcccgcaagccacccgtcatcaagcaagtgtggaccaatgccatgaaactgtcagaaaaatcagtggccgaggggattcctggggcagttccccctgcggagatttatgtggaggaggacttggcccagcaggacaaggatgaaataattctgctgctgggaaaagaggtcagccgtctctcagattatgaaattgaatccaaatacaaagacgtcataatagcaaacctgcagaatgaagtggctgagctgagtcagaaggtgtcagagaccaccacctccaggcagaatgagaaggagatctcgcagaagtgtcaggttctggatgaagacatcgatgccaaacagaaagagatccagagcttgaaaagccagatcagtgccctacagaaaggctacagcaaggtgctgtgccagaccctgtcagagcggaactcagaaatcacatccctgaagaatgagggcgagaacttaaagagagacaacgctatcacatcagggatggtgtcatctttgcaaaaagacatattagcaaaggatgagcaagttcaacaactaaaggaagaggtcagtcacctaaaaagtcagaacaaggacaaggaccaccagctggaagcccttggctctagatgctcggtgctaaaggaagagttaaaacaggaagatgctcacagggagctcagggaagcccaggagaaagagttaaaactctgcaaaacccaaatccaagacatggagaaagaaatgaagaagcttagggcagagctgaggaagagttgtactgaacaaagcgtgatctctaggactctgagagaaaaaagcaaggttgaagagaagcttcaggaggattccagaaggaaattgcttcagctgcaagaaatggggaacagagagagcgtcattaaaatcaatttggagagggcagtaggtcagctggagcacttcagaagtcaagtcatcaaggccacctatggacgggcgaagccgttccgggacaagcccgtcaccgaccaacagttaatagagaaaattacccaggtcactgaggacaacatcaattttcagcagaaaaagtggaccctccagaaagagacccagctgagcaactccaagcaggaggagaccaccgagaacatcgagaagctgaggacgtcgctggacagctgccaggcttgcatgaaaatatcctgttgcagccatgacctgaagaaggaggtcgaccttcttcagcacctccaggtgagcccacctgtctcggggctccagaaggtggtgctggacgtcctgaggcacgcgctgtcctggctggaggaggtggagcagctcctccgggacctcgggatcctgccctccagccccaacaaagatcaagttcaacagttctcaggaaactcagcagtctttactgcaggaaaagctgcgggagcatctggcagagaaggagaagctgaacgaggagaggctagagcaagaggagaagctcaaagccaaaatcaggcaactgacggaagagaaggcggtaaggctttggaggagtacattactcaagagagaaacagagcgaaagagactttagaggaagaacggaagagaatgcaagaactggagagcctcctggcccagcagaagaaggctttggcgaaaagcattacccaggagaagaacagagtgaaggaagcattagaggaagagcagacaagagtccaagagctggaggaacgcttggcccgccagaaggaggttttggagagcagcatagcccatgaaaaaagaaaagcaaaggaagccttggagtcggaaaagagaaaagttcaggatctggagaaccatttaacccaacagaaggagatctcagagagcaacattgcgtacgagaaacgcaaagcaaaggaggccatggagaaggaaaagaaaaaggtgcaagacctggagaatcgcttaaccaagcagaaagaggaattagaattaaaagagcaaaaagaggacgttttaaataataaattaagtgacgcactggccatggttgaagagactcagaaaacaaaggcaactgaaagtctaaaagcagagagcctcgccttgaaattaaatgaaacattagccgaactggaaactaccaagacaaaaatgatcatggtggaagagcggctaatcctgcagcagaagatggtaaaggccctccaggatgagcaggaatcacagagacacgggtttgaagaagagatcatggaatataaggagcaaatcaaacagcacgcccagacaattgtgagcctcgaagagaaactccagaaagtcactcagcaccataaaaaaatagaaggcgagattgcaacattgaaggacaatgacccagccccaaaggaggaaaggccgcaagaccctctggtggctcccatgacagagagcagtgccaaagacatggcgtacgaacatctgatagatgacttattggctgctcagaaggaaattctgtctcagcaggaagtcatcatgaagttaaggaaagaccttaccgaagcccacagcagaatgtcggatttgagaggggagctaaacgagaagcagaagatggaactggagcagaacgtggtgctggtccagcagcagagcaaggagctgagtgtgctcaaggagaagatggcccagatgagcagcctggtagaaaagaaagatcgggagctgaaggcccttgaggaggcactcagggcttcccaagagaaacacagactccagctgaacacagagaaggaacagaagccccggaagaagacccagacgtgtgacacctctgtgcagatagaacccgtccacactgaggccttctccagcagccaagagcaatccttcagcgatctaggggtcaggtgcaaagggtcccggcacgaggaggtcattcagcgtcagaaaaaggccttatctgaacttcgagcgcgaattaaagaactcgagaaggcgcgctcaccagatcataaagaccaccagaatgaatcatttctagatttaaagaacctcagaatggaaaacaatgtccagaaaatactactggatgcaaaaccggatttgccaactctctcaagaatagagatcctagcgcctcagaatggcctttgcaacgcaaggttcggctcagccatggagaagtcagggaagatggatgtggctgaggctttagagctcagtgaaaagctgtacctggatatgagcaaaaccctcggaagtctcatgaacatcaagaatatgtcaggccacgtgtccatgaaatacctctcccgccaggagagggagaaggtcaaccagcttcgacaaagggacctcgacctggtgtttgataagatcacccaactcaagaaccagctggggaggaaagaggagctgttgagaggatatgaaaaggacgttgaacagctcaggcggagcaaagtgtccattgagatgtaccagtcgcaggtggcaaagctggaggatgatatctacaaagaggccgaagagaaggccctgctgaaggaggccctggagcgcatggagcaccagctgtgccaggagaagaggatcaacagggccatccggcagcagaagtagatgggagcttccagcccctgcctcgcagacagatggtgaggatgaaagaatgcaggcatccctcgctatctgctgtccactctcgctgtcgtcatacctcaggagccaagtgcttttggatggtgagggtgcttgtcccgtctctgaagcacctgcccagggcctggcaccagccggcggacactgccttccccatgctgcccatgacccatgctgcccgtgacccatgcaggtggtctcctgggaaagtgtagaggagcacgaactgagaaacgcaaaagaatcgacaccttgcaactgtgccttcaaagagaaagacaggcagagacgagtatttgtagagatggtgaagaacaggatgcagaactcaaattcccaggttggaaccagaaaagcctccctaaagatggaccaagaaagagagatgctgaggaaagagacctccagcaagtccagccagagccttttgcattctaagcccagtggaaagtactagagaaacctcgtcccaccaggcctcatgtgatcctctgtgagttcatgtgactcttctgtgtcatctgtgtcaaaatactgagttgcttttgtaagtcttt

SEQ ID NO: 64 - DNA, 3015 bp, Homo sapiens
gcggcgggcgagcggagcggcgcgcctgtccggagctcggcggtggcgccggaggaggctgcagcggcggcggcggcgggcccggacgagcgtccggaggtggcggacgaggcgccgggggcccccatgggcgggtgtgtgggcgcccagcacgactcctcgggcagcctcaacgagaactcggagggcaccggagttgctctaggtcgtaaccagcctttgaaaaaggagaaaccaaaatggaaaagcgattatcctatgacagatggacaactacgcagcaagagggatgaattttgggatacagcaccagcttttgaaggccggaaagagatttgggatgccttgaaggctgctgcacatgcttttgagagcaatgatcatgaactggcacaagcaatcattgatggtgcaaacataacattaccacatggtgcacttacagagtgctacgatgaactggggaacagatatcagcttccagtgtattgcttggcaccgccaatcaacatgatagaggaaaagagcgacatagagactctggatattcctgagccaccacccaattctggatatgaatgtcagcttcgtttgcgcctttccacaggcaaagacctcaagcttgtggttcgcagcacagacacagtattccacatgaagagacggttgcatgcagcagagggagtggaaccaggtagtcagcggtggtttttttctggcagacctctcactgacaaaatgaagttcgaagagctgaagatcccaaaggactatgttgtacaggttatagtgagccaacctgtgcagaacccaacaccagtggagaactgaactgagccctgttggccagctcccacatccctctgctcctttttatggttcttgttgtcatttcctactctgcggcgtgaaatctatttcactgctctaaattccctatgaatggatttagttctgaggaattaccagtgaaaaattccatctgtgatggagaccaacaaaaataataaaacacaaagagccaggctttgagactcatgtaattacaatttctaatttgaaaggcagttaagaaatagataaccatttattttagaacactcaacaactatgtaatggctatatttcagtgacttggactgtaaatgaaacattgcatccatgaaggacagcaccaagcacctttttgaatacagaatttttttagaaaaatatatcaaattatataatttccagaaaccataaataatggatataaaacttaacctttttgttttgttttgttttgttttgttttgttttgttttgttttggttaatggaaactgaaaagagcagtatttgaggttgcttctattctggttttttattcttagctcaattaatatttagccataaatgagtagagactggcaaattgtgctttagtgttgctttcctcatccccacatcttgagctccttatttacattcacactaaattttggtgccttccagcacattagtggcaggcacccttctggaacactaggcaataatttcatcaatacagtcaggtctcttgagtttcaacagatactcagttgaaaagtcgctgtcatcttgctgcataagtattttgaaaggtctgtataacgaagccatttttatatccaggcttagaaggtcactactatatagtaccttcattgatctatctattctgcttggaacttttcatagctaagtataacccccaaatgcatggttcctgggtcaggagacaccaaaatcaattatagctgttcccactcaagttaataaagtaaatgatttcctccactttgcatggaggggtgtaaggaaagcctattttatctgtgcctgggagaactgtgcctattttcagtcttttagaggaaatttcaactcaaaatttttaagtgtgaaagatttactggtgtcacataaacattagcagtgagaccaaataatgaaacattgctttataccttagtgctttccagttcactgttacctctagtcatggtagatgacaattttcctccctcatcttttgtagcaaagaagcaaattaagagccttttgcaagttagattaggggactgaaaaatccagggagataacctgattcttctatactatgactggagtaaagctgccaagagttaggttgaatttggagccttttaaaagttggttccataagtgagaaggggggctaacatgtgaccactgtgcccctgagaatccatgagatggaaaagtacagacaagaaggcacttaacgctgttctcagttggaaaatgtcagccctccacacctgtttggatgtgaagtgcattattaattttaatgacaaaatgaaactgctaattagtttaaatgtaatgtttaaatggtattgaatttcctattgcctgattaaatatatctgtaattgtaacatcatgtttctgagagctttaactacttccttatttttatgcaatcattttaaagattgtggctatatctaatttaaatttgctgatgattgaatctaaattcaagtgaagaccacagcattaatcccaaaggagattttttttatgtttagaggtggagatattagggtaaatcagtatattgctcctgtcatcaaagtttttgttcatttgtgtgccacatcgaatagcagcacttctcaaagtttgtcaactggaaaaaagtgtttaaaactgtttttttcttaagcagatttggtgatgtcatcaatatctatgatatcgattggtaaaaggtctttctttgttgaggatttgagctctctttttaagagtttattttattttaaaggaacatatgctttgaataacaattctctgggcatgtttaactaacctaggtgggaaaaccatggtgctgtttaattgtaaatagattgatataagattggaccagtacttgatgtgtataattttagtatgtagggtttatgtgctttttttaaaaaaaaaaaaaaggttcaatttt

SEQ ID NO: 65 - DNA, 2439 bp, Homo sapiens
cgcctctgccggaggagccgcggggccgccacactcgccccccgccccccccgcgctcactcgcactcacacccgggcgcaggaggcgggcggcccgggccccaccggccccccatggacgcccccagcacggggcgctgagacccccgcgtcgctgcccagcccggtccggcgcgccacgccgagggatctctggacaggacaagactccgaagctactcccccagcacacagcccgggacccacaaacccagcttgcccccagccctcccacctgccactccctggcccctcccaccgcccgccccccttggggcgcagggcatggtgtgaaaggccaagtgctgaggcgggtatcatgggtgctgtgccctagggcctgggtggcagggggtgggtggcctgtgggtgtgccgggggggccagtgtgcccaccccagtctcttggcgtgctggagggcatcctggatggaattgaagtgaatggaacagaagccaagcaaggtggagtgtgggtcagacccagaggagaacagtgccaggtcaccagatggaaagcgaaaaagaaagaacggccaatgttccctgaaaaccagcatgtcagggtatatccctagttacctggacaaagacgagcagtgtgtcgtgtgtggggacaaggcaactggttatcactaccgctgtatcacttgtgagggctgcaagggcttctttcgccgcacaatccagaagaacctccatcccacctattcctgcaaatatgacagctgctgtgtcattgacaagatcacccgcaatcagtgccagctgtgccgcttcaagaagtgcatcgccgtgggcatggccatggacttggttctagatgactcgaagcgggtggccaagcgtaagctgattgagcagaaccgggagcggcggcggaaggaggagatgatccgatcactgcagcagcgaccagagcccactcctgaagagtgggatctgatccacattgccacagaggcccatcgcagcaccaatgcccagggcagccattggaaacagaggcggaaattcctgcccgatgacattggccagtcacccattgtctccatgccggacggagacaaggtggacctggaagccttcagcgagtttaccaagatcatcaccccggccatcacccgtgtggtggactttgccaaaaaactgcccatgttctccgagctgccttgcgaagaccagatcatcctcctgaaggggtgctgcatggagatcatgtccctgcgggcggctgtccgctacgaccctgagagcgacaccctgacgctgagtggggagatggctgtcaagcgggagcagctcaagaatggcggcctgggcgtagtctccgacgccatctttgaactgggcaagtcactctctgcctttaacctggatgacacggaagtggctctgctgcaggctgtgctgctaatgtcaacagaccgctcgggcctgctgtgtgtggacaagatcgagaagagtcaggaggcgtacctgctggcgttcgagcactacgtcaaccaccgcaaacacaacattccgcacttctggcccaagctgctgatgaaggagagagaagtgcagagttcgattctgtacaagggggcagcggcagaaggccggccgggcgggtcactgggcgtccacccggaaggacagcagcttctcggaatgcatgttgttcagggtccgcaggtccggcagcttgagcagcagcttggtgaagcgggaagtctccaagggccggttcttcagcaccagagcccgaagagcccgcagcagcgtctcctggagctgctccaccgaagcggaattctccatgcccgagcggtctgtggggaagacgacagcagtgaggcggactccccgagctcctctgaggaggaaccggaggtctgcgaggacctggcaggcaatgcagcctctccctgaagccccccagaaggccgatggggaaggagaaggagtgccataccttctcccaggcctctgccccaagagcaggaggtgcctgaaagctgggagcgtgggctcagcagggctggtcacctcccatcccgtaagaccaccttcccttcctcagcaggccaaacatggccagactcccttgctttttgctgtgtagttccctctgcctgggatgcccttccccctttctctgcctggcaacatcttacttgtcctttgaggccccaactcaagtgtcacctccttccccagctcccccaggcagaaatagttgtctgtgcttccttggttcatgcttctactgtgacacttatctcactgttttataattagtcgggcatgagtctgtttcccaagctagactgtgtctgaatcatgtctgtatccccagtgcccggtgcagggcctggcatagagtaggtactccataaaaggtgtgttgaattg

SEQ ID NO: 66 - DNA, 1437 bp, Homo sapiens
ggagataagattcagaggttgaggatggggtgtcctggtggactgaaggtagcctactagctgtacatgggtgacaacttgaaacttcagaaccctgaagtttaaaaaattctaaaggtgcctgtcatctcagagagtgacgtaagtgttctttctttatttgggggaagtccaggagaacatattacagacatgtttaatccacatgcattagatgttcctgctgtaatttttgacaatggttcaggactctgcaaagcaggcctgtctggagagattggaccccgccatgtcatcagctccgtcttgggacattgtaaattcaatgtgcctttagcaagacttaatcagaagtacttcgtggggcaagaagccctgtacaagtatgaggccctacatttgcactaccccattgagcgtggactggtaacaggatgggatgacatggagaaactctggaaacatctctttgagcgggagcttggagtaaaacccagccaacagcctgtacttatgaccgagccctctttgaatcctagggaaattcgagaaaagctagcagaaatgatgtttgagaccttcagtgtgcctggtttctacctgtctaatcatgcggtggcagcgctctatgcctctgcctgtgtcacaggcctggtggtggacagtggagatggggtcacttgcactgtccccatctttgagggttactccctgcctcacgcagtcaccaaactctgtatggcagggagggacatcacagagcacctcacccggctcctctttgctagcgggtttaacttcccttgcatactcaacaaggccgtggtaaataacatcaaagagaagttgtgctacatcgccttggagccagagaaagagctacgcaagagccggggagaggtcctgggagcatacagactgccagatggacatgtcatccactttggggatgagctgtaccaagtgcccgaggttctttttgcacctgaccagctgggcatccacagcccaggactctcaaaaatggtctccagcagcatcatgaagtgtgacactgacatccagaataaactttatgcagacattgtactctccgggggcaccactctcctccctgggctggaggaaaggctcatgaaggaagtggaacagctggcttccaaaggtactcccatcaagatcacagcttctcctgatagatgcttctctgcatggattggtgcatccatcatgacctctatgagcagtttcaagcagatgtgggtcacctcggcagacttcaaggagtatgggacatctgtggttcaaagaaggtgcttttaaagatccttgagcagaggagacatcttgaagtgtcagattacaggagtaccagtgggagatggcattttcttctgggcttcagcatgatgttcaataaaagttttgccatttcaa

SEQ ID NO: 67 - DNA, 2370 bp, Homo sapiens
gcagcgccggtcgggagcgcagcgcggcgcacgtcggcgcgcacggcgggacgggcgccggagtggtcgggcctggcggctggacgggcgcccctcgctgccccgcgcgctccccgccgccccccatgagcgcagccccgcgcggcccgggtccgtaggcggcggggcgccccccatgctgctgcagcccgcgccgtgcgccccgagcgcgggcttcccgcggcccctggcgcccggcgccatgcacggctcgcagaaggacaccacgttcaccaagatcttcgtgggcggcctgccgtaccacactaccgacgcctcgctcaggaagtacttcgagggcttcggcgacatcgaggaggccgtggtcatcaccgaccgccagacgggcaagtcccgcggctacggcttcgtgaccatggccgaccgggcggcagctgagagggcttgcaaagacccgaaccccatcatcgacggccgcaaggccaacgtgaacctggcatatctgggcgccaagccgcggagcctccagacgggctttgccattggggtgcagcagctgcaccccaccttgatccagcggacttacgggctgaccccgcactacatctacccaccagccatcgtgcagcccagcgtggtgatcccagccgcccctgtcccgtcgctgtcctcgccctacattgagtacacgccggccagcccggcctacgcccagtacccaccggccacctatgaccagtacccatacgccgcctcgcctgccacggctgccagcttcgtgggctacagctaccctgccgccgtgccccaggccctctcagccgcagcacccgcgggcaccactttcgtgcagtaccaggcgccgcagctgcagcctgacaggatgcagtgaggggcgttcctgccccgaggactgtggcattgtcaccttcacagcagacagagctgccaggccatgatgggctggcgacagcccggctgagcttcagtgaggtgccaccagcacccgtgcctccgaagaccgctcgggcattccgcctgcgccctgggacagcggagagacggcttctctttaatctaggtcccattgtgtcttgagggaggactttaagaatgactgagaactatttaaagacgcaatcccaggttccttgcacaccatggcagcctctccttgcaccttctcctgcctctccacactccaggttccctcaggcttgtgtccccactgctgcatcgtggcggggtgtcacagaccctctgcagcccctggctgccctggactgtgcagagatgcctgactccagggaaacctgaaagcaagaagttaatggactgtttattgtaacttgatcctcccgagctgtgagcgcagtctgaggtgtgaggacacggcctcctgttggagtcccattttctccatcagggcacgtgggcggcttcctcaagcccggaggagctcccaggcgcacaggggccgccggtaacaggggccgccggccaaaggcccctttccagtcatagcactgaagttgcaacttttttcttgtaattgttttgctactaagataatttcagaagttcagtctattttttcagcggatactgccgccaccaagaatccaaaacctatttttgacttggagagacttgcttttgttggttccgcccgtggagacgacgatagtgtttctgtataataaagtgtctgccggctcgcgggccaggatcctctcggtgggatgggcaccacagacaggaggcccctcaggcccgtgcgggccactgtctgctgccgcctgccggggtggcagagtgagttgtctcaggaccccgtcactgcgacgttgacactcctctcccttcccttcctccccaactccccaaacactgtggaaggggagaaggaagtgatccacagcattcaggccacttggggtctagaccatggtggtgccagcctggggggggcagtggccctcagctctgcccgctggagcggttgagtgcagaagggtgcgcctcttccctctacccccgcaccacctgctgtgtgccagcctgagacggttcctgcctgtcttgggggttggtggagggtggaggcagttctgccagccgtggcagggctgctatggggcatccagggctgtgggggtctggaggaggggacatgaggtgagaggtatcctggccgagggcggggggcagcggggggtctccctccggacctacctcagggagctgagcgtgcaggcgctccagggcaggcctgggacagagtcaaggctcagagaataaaggtagctaatctcatcataatatttttattagaatgttctgatgataaaaataaaacttgttttcttt

SEQ ID NO: 68 - DNA, 1075 bp, Homo sapiens
gttttcttcgaagatttggggctccgcgatacagttaggatggctgtagtacctctgctgttgttggggggtttgtggagcgctgtgggagcgtccagcctgggtgtcgttacttgcggctccgtggtgaagctactcaatacgcgccacaacgtccgactgcactcacacgacgtgcgctatgggtcaggtagtgggcagcagtcagtgacaggtgtaacctctgtggatgacagcaacagttactggaggatacgggggaagagtgccacagtgtgtgagaggggaacccccatcaagtgtggccagcccatccggctgacacatgtcaacactggccgaaacctccatagtcaccacttcacttcacctctttctggaaaccaggaagtgagtgcttttggtgaggaaggtgaaggtgattatctggatgactggacagtgctctgtaatggaccctactgggtgagagatggtgaggtgcggttcaaacactcttccactgaggtactgctgtctgtcacaggagaacaatatggtcgacctatcagtgggcaaaaagaggtgcatggcatggcccagccaagtcagaacaactactggaaagccatggaaggcatcttcatgaagcccagtgagttgttgaaggcagaagcccaccatgcagagctgtgaatctagaggctctgagccactgttaacgcacaatgttcacagacatctgttgctgcctcaccttgggatccctgccacaagttccttgggcagtggccatgtcaccattgagatgaagatatacaacagaaaatagtggctgtgtttggaagcttcagccctgcacatttgaactagtcactctcccagacttgcgtgggtcagttctttctgagtagaggacttgctggtaaaggggcagatgctttttattagtactgataaaacaaactgagggaaacatccctcttagctgggaaacttttactcttcaggagcttggcatcatggactgttaatgtatgtgattttccccctattttctctctccaaaatgataaaaacaataattttattatga

SEQ ID NO: 69 - DNA, 1308 bp, Homo sapiens
atgccgatgtcttctcttccagcagctattttgtctcacatgacagctattaacaatgtgcctcctcctccacttcacagtataccaaacttgaaaaagtctaagcacattaattatggccagttgaatgcattatgccacattagaggacaacacagccggagtatgagcaatatcttatcagctcacgatacatttatgaagcaatatcctaaagtattcctgcaccaaaaacccagacttcctaaacttttcaaacaggaggaacaaagggaactcaatgaaggcaaagaggaaagtcaacatcaacaacctgatgattctaacaatatagctgtccatgttcagagagcacatggtggccatattttatatagaccaaaaagagccacagagaaatttgaagaattcctagctatcttaaagaaattgcccattcacaggacgccatatgaacacaaaactgtgtggaagttcctgaaaacaattccagatttaacctttcagctaaatgataagcatctgaaaacacttagtaagactgtcttttccgaaacctggttgaaaggcagcacagtggttgcaaatgatggattttatgtaatactgaaaggcctagctcgacctcaaacaaacgtgtataaaaatctgattgaaggaagtgattcaccagactcgttcatatctcagagtttccacagcttcatttggagtgaagaattcaaaaactctacacttgctgagatgtacctaccttcatatgactcaatgcttagcaaatggagtacctttgggactctggaagttatgcctcagaatgaatcggaaacacagatgttctcggtggtgacagaagacgattgtgaaattcttaaaatcccagcaaagggatatgcaaagataaaggaggaaaaaataaaacttgaaaatatgcaaaagttgaaattaatccgtatgtgtccttattatgaggaatggcctactttatccatatatgagctaattgcactccttaaatggaaaaaatttcctccaggtcatgtgatagtggaaagtggaaatataatttcttttgtgggttatattaactctggatgctgtaacatttatagaagtattataggatttgtgaaactacgatcaaataaagtgaaaagatctcaaaaacttgtttatatggggaaacttaaggagaaggagtcctttggtgagattagcgtccttcttcaagttcctttcacgtgcacaatcattaccaaaaaagaagttgagatggcaatcattgaagataaggacctatttgatgca

SEQ ID NO: 70 - DNA, 3021 bp, Homo sapiens
atttaaactcccagagccgttaagttggttcgtagtctgatgcgcgcgcaaccagggtggtggcggagtgcgcatgcgtggttcccgggcgaagggaacgcgcgctcaccgtgcgcgctcgcggccgggtggtagtggcggaggagaaaggggtcggcgcacgcgcggttgagtcctcgagtagttcgggtctcgcgggcctcttgttttggtctcgcgggctagtagggcgcacttggcggggaggcgcttgggcgcgagactaggcgtgaagagcagagctgcgcgcgcactcgggaaaggggggaagggagcagggtccaggcagggggggttaggccccctgatccccctcgttaccccgactggcacggaataaggggaggaaatgatcgagatggcggcggagaaggagccgtttctggtgccggccccgccgccgccgctcaaagatgagtcgggcggagggggcggccccacggtgccaccgcaccaagaggccgcctctggggagctccgcggcgggacggagcgtggtccgggtcgttgcgcgccatctgcggggtccccagccgctgcggtcggtcgggaaagccccggggccgcggccacctcctccagtggtccccaggcgcagcagcaccgagggggcggcccccaggcgcagtcgcatggggaggcccgcctgtcggatcccccggggcgagccgctcccccggacgtgggggaggagcgccggggagggggcgggacagagctgggtccccctgctcctcctcgaccccgcaatggctatcagccccaccggccacctggggggggcgggggcaagaggagaaatagctgtaatgtagggggaggcgggggaggcttcaaacatccggccttcaagaggcgcaggcgggtgaattcggactgtgactctgtgttaccctccaacttcctcctggggggcaatatctttgatcccctgaacctgaatagcctcctggatgaggaagtgagccgcactctcaacgcggagacccctaagtcatccccccttccggccaaagggcgagatccggtggagatcctcatccccaaagatattactgacccgctcagtctcaatacttgcactgatgagggccatgtagttcttgcttcgccactcaagactggtcggaagcggcatagacaccggggacagcaccaccagcagcagcaggcagccggagggagtgagagtcaccccgtgccgcccacagcccctctcacccccttactccacggggagggcgcctcacagcagccgcggcacaggggccagaaccgggatgccccccaaccctatgaactcaacacagccatcaactgcagggatgaagtggtgtctccccttccatctgctctgcagggtccctcaggctccctatcagcccctccagctgcctcagttatctctgcacccccatcttcctcctcccgacatcgcaaacgtcgcaggacttccagcaagtcggaggcaggggctaggggtggaggccagggttccaaggaaaagggccgagggagttggggaggccgccaccaccaccaccacccactgcctgcagcaggcttcaaaaagcaacagcgcaagttccagtatgggaattattgcaaatactatgggtaccgcaatccttcctgtgaggatgggcgccttcgggtgttgaagcctgagtggtttcggggccgggacgtcctagatctgggctgcaatgtgggccatctgaccctgagcattgcctgcaagtggggcccgtcccgcatggtgggcctggatatcgattcccggctcatccattctgcccgccaaaacatccgacactacctttccgaggagctgcgtctcccaccccagactttggaaggggacccgggggcagagggtgaggaagggaccaccaccgttcgaaagaggagctgcttcccagcctcgctgactgccagccggggtcccatcgctgccccccaagtgcccttggatggagcggacacatcagtcttccccaacaatgttgtcttcgtcacgggtaattatgtgctggatcgagatgacctggtggaggcccaaacacctgagtatgatgtggtgctctgcctcagcctcaccaagtgggtgcatctgaactggggagacgagggcctgaagcgcatgtttcgccggatctaccggcacctacgccctgggggcatcctggtcctagagccccaaccctggtcgtcgtatggcaagagaaagactcttacagaaacgatctacaagaactactaccgaatccaattgaagccagagcagttcagttcctacctgacatccccagacgtgggcttctccagctatgagcttgtggccacaccccacaacacctctaaaggcttccagcgtcctgtgtacctgttccacaaggcccgatcccccagccactaagtggccccctaaacagaaagtgtgaagaggctgccctcgctgctcataaggacctgggggaagaggaaagtgtcccaaggtctttcctttctgactccaaaaatagtttcctttcttggatctgcaaagaaagcttttcttccgtcgctgcctcagcctcctccctatgcctctggcacctgcgcagcaaggctggctgtgctggagtcaccatcatcttcctctcccccagcctcccaggctggatggcatggactgtttgctgacctctgttctcttagggcatgggaggtgggaggatatcaaattctctagccctttcctcctattctcccaaggagagagattcccatttctcctcggccattgtacctagctcttgtccctagctgcatttcagtggaccatggatagagggactgagggttagacggggaagactggcagggaggcacgcaggtactgtgaaaatccttccctttgccctcccccagtgggagagggggttgggttttcaatgtgagaacagcacaataaacttgatgtctagggcagtggccccc

SEQ ID NO: 71 - DNA, 1081 bp, Homo sapiens
agtggaagaccaggcagcccagctgaaggcagtaagctcggctcacagtcgcaggagagttctggggtacacgggcaaaggggcttgagaaggcccggaggcgaagccgaagagaagcaactgtgccccggagaagagaagctcgcccattccagactgggaaccagctttcagtgaagatggcagggccagaactgttgctcgactccaacatccgcctctgggtggtcctacccatcgttatcatcactttcttcgtaggcatgatccgccactacgtgtccatcctgctgcagagcgacaagaagctcacccaggaacaagtatctgacagtcaagtcctaattcgaagcagagtcctcagggaaaatggaaaatacattcccaaacagtctttcttgacacgaaaatattatttcaacaacccagaggatggatttttcaaaaaaactaaacggaaggtagtgccaccttctcctatgactgatcctactatgttgacagacatgatgaaagggaatgtaacaaatgtcctccctatgattcttattggtggatggatcaacatgacattctcaggctttgtcacaaccaaggtcccatttccactgaccctccgttttaagcctatgttacagcaaggaatcgagctactcacattagatgcatcctgggtgagttctgcatcctggtacttcctcaatgtatttgggcttcggagcatttactctctgattctgggccaagataatgccgctgaccaatcacgaatgatgcaggagcagatgacgggagcagccatggccatgcccgcagacacaaacaaagctttcaagacagagtgggaagctttggagctgacggatcaccagtgggcactagatgatgtcgaagaagagctcatggccaaagacctccacttcgaaggcatgttcaaaaaggaattacagacctctattttttgaagaccgagcagggattagctgtgtcaggaacttggagttgcacttaaccttgtaactttgtttggagctggcacctcttgaaataaaaaggaggatgcacgagctggcaggcatgc

SEQ ID NO: 72 - DNA, 3161 bp, Homo sapiens
agcgaccgcagccggggggacgcgggaggatggagcaagtggagatcctgaggaaattcatccagagggtccaggccatgaagagtcctgaccacaatggggaggacaacttcgcccgggacttcatgcggttaagaagattgtctaccaaatatagaacagaaaagatatatcccacagccactggagaaaaagaagaaaatgttaaaaagaacagatacaaggacatactgccatttgatcacagccgagttaaattgacattaaagactccttcacaagattcagactatatcaatgcaaattttataaagggcgtctatgggccaaaagcatatgtagcaactcaaggacctttagcaaatacagtaatagatttttggaggatgatatgggagtataatgttgtgatcattgtaatggcctgccgagaatttgagatgggaaggaaaaaatgtgagcgctattggcctttgtatggagaagaccccataacgtttgcaccatttaaaatttcttgtgaggatgaacaagcaagaacagactacttcatcaggacactcttacttgaatttcaaaatgaatctcgtaggctgtatcagtttcattatgtgaactggccagaccatgatgttccttcatcatttgattctattctggacatgataagcttaatgaggaaatatcaagaacatgaagatgttcctatttgtattcattgcagtgcaggctgtggaagaacaggtgccatttgtgccatagattatacgtggaatttactaaaagctgggaaaataccagaggaatttaatgtatttaatttaatacaagaaatgagaacacaaaggcattctgcagtacaaacaaaggagcaatatgaacttgttcatagagctattgcccaactgtttgaaaaacagctacaactatatgaaattcatggagctcagaaaattgctgatggagtgaatgaaattaacactgaaaacatggtcagctccatagagcctgaaaaacaagattctcctcctccaaaaccaccaaggacccgcagttgccttgttgaaggggatgctaaagaagaaatactgcagccaccggaacctcatccagtgccacccatcttgacaccttctcccccttcagcttttccaacagtcactactgtgtggcaggacaatgatagataccatccaaagccagtgttgcatatggtttcatcagaacaacattcagcagacctcaacagaaactatagtaaatcaacagaacttccagggaaaaatgaatcaacaattgaacagatagataaaaaattggaacgaaatttaagttttgagattaagaaggtccctctccaagagggaccaaaaagttttgatgggaacacacttttgaataggggacatgcaattaaaattaaatctgcttcaccttgtatagctgataaaatctctaagccacaggaattaagttcagatctaaatgtcggtgatacttcccagaattcttgtgtggactgcagtgtaacacaatcaaacaaagtttcagttactccaccagaagaatcccagaattcagacacacctccaaggccagaccgcttgcctcttgatgagaaaggacatgtaacgtggtcatttcatggacctgaaaatgccatacccatacctgatttatctgaaggcaattcctcagatatcaactatcaaactaggaaaactgtgagtttaacaccaagtcctacaacacaagttgaaacacctgatcttgtggatcatgataacacttcaccactcttcagaacacccctcagttttactaatccacttcactctgatgactcagactcagatgaaagaaactctgatggtgctgtgacccagaataaaactaatatttcaacagcaagtgccacagtttctgctgccactagtactgaaagcatttctactaggaaagtattgccaatgtccattgctagacataatatagcaggaacaacacattcaggtgctgaaaaagatgttgatgttagtgaagattcacctcctcccctacctgaaagaactcctgaatcgtttgtgttagcaagtgaacataatacacctgtaagatcggaatggagtgaacttcaaagtcaggaacgatctgaacaaaaaaagtctgaaggcttgataacctctgaaaatgagaaatgtgatcatccagcgggaggtattcactatgaaatgtgcatagaatgtccacctactttcagtgacaagagagaacaaatatcagaaaatccaacagaagccacagatattggttttggtaatcgatgtggaaaacccaaaggaccaagagatccaccttcagaatggacatgattcagggagctagaagacactttaagttatactggaaaattcaggtgccactgaaagccagatttatagtattccatctttaatatgtgggactaacagcagtgtagattgttaccttaatattttttgctgggaccatctacctgccttatactacacttaggaaaaagtattacatatggtttattttgaaacttcaagtattattgccttaatgtctcttaaccctgttacacgctgcttgtagacatgttaatatagtaatacctttatgatatattgagtttaaggactactctttttctgttttatcatgtatgcattattttgtatatgtacagggcaagtaggtatataatttgataaagttgcaattgaaatattattaacagaagatgtaagaaatttctgcatggtctaaatctttgtgtactttatttgtaaattatttgccctggagttttagaaaatagtttctgaattttaaacttgctggattcatgcagccagctttgcaggttatcagagatcaaagattgtaataataattttgtaaattgtaagcaaaaagttatttttatattatatacagtctaattgttcatcctaattgttcctgttttcatctagtcagagattcagtaagtgccttggaacaatattgaattctcttagcttgtgtgtgtttctttaatatttgaactcaagtgggattagaagactatcaaaatacatgtatgtttcaggatatttgacctgtcattaaaaaaaacaaacagttttacagtg

SEQ ID NO: 73 - DNA, 1520 bp, Homo sapiens
gcgtcgggctgcaggagaagatggcggtctccacaggagttaaagttcctcgtaattttcgcttgttggaagaacttgaagaaggacaaaaaggagtaggcgacggtacagttagctggggccttgaagatgatgaagatatgacacttacaaggtggacaggcatgattattgggccaccaaggacaaattatgaaaacagaatatatagcctgaaagtagaatgtggacctaaatacccagaagctcctccgtcagttagatttgtaacaaaaattaatatgaacggaataaataattccagtgggatggtggatgcccggagcataccagtgttagcaaaatggcaaaattcatatagcattaaagttgtacttcaagagctaagacgtctaatgatgtccaaagaaaatatgaagcttccacagccaccagaaggacaaacatacaacaattaattttagtggatctcaaacttgtcttaaatcaacaaccttctactcatgttaatgtcttgattaaatatcacaatgcaaaatacacattaagtaaaagaattccagctggtaaacatgacctggacatttgtaagaatatatttaatatatgtacacccattatgttttcaggtaacaggaggaaaaatgcagcacaattttttttctcttgaaaggcactgtcatttaaacataaacctggagtactcgaaatagaattcaggtttacaagatgaaagcgtgtggagaagtgtcagatggcagtggaagcatgtgtgtttctaaaaagtaaaaatctcaagaaaacagaaatggcatgctttacccatcttacttagtgaaagagagctgcagttgaaattgtttaaaaagtagcaggtacaatgaatattgtcacagatgtgttaatttttgaagcaatgtgggtgctgactactagtagtatcaaaaatatgttcaggattgttttgatacctgtatttataataaaaaatgttggggggagttgatgaattcctgttaaaagctgttcttgtgtgttacatgtaacagacatggtaaatatttgtttacagtctttgtttaacaaaccatgcatttaagtttaagtgaagtcaacaaaaaggaaataggtgtatggatatgtgattttgagattaaagttagtcttaaaatgtaaataaaatgtgaaacgtgtcctcagagactgtgccatttctattatgttgatgtatatgtacagtaccttgccagggaagcaaaaattggaattattgtagcttttcatgtatacacacttttatttaccctattttgtgtacttcttgtgaattataatttgcagactatttcagaaaagaaattatctagtttaatttcttctttggacaaggagtcctaggtattatattttgagtttgatttcaccagaaataataatattaaaaagatctttgcattctggcagttcttttaggattataggttgcaaattatccaaatatatatcccattttttaaagc

SEQ ID NO: 74 - DNA, 5840 bp, Homo sapiens
gtctccactagaggctgcacagcccgcccggaccaacgcctccgcgcctgccgccgtctggccggcgccctcccgtttccttcctccagggggaaaaaatgtctttcgggccgctttccaggaagcagcaggatgcgccgctccactgtcggtagcaacaagctgcgcaaaccatgcaggatgatttactgatggacaaaagcaaaacccagccccagccccagcagcagcagcggcagcagcagcagccccaacctgagtccagcgtatccgaagccccgtccacgcccctctcctcagagacccccaagccggaggaaaacagcgcagtgccggccctcagcccagccgctgcccccccggcccccaacggcccggacaagatgcagatggaatcaccgctcctgccaggcttgagtttccatcagcctcctcagcagccgccgccgcctcaggagcccgcggcaccgggcgcgtcgctgtcgccgtccttcggcagcacctggtccacgggcaccaccaacgcggtagaggacagcttcttccaggggatcaccccagtcaacgggaccatgctcttccagaacttcccgcaccatgtcaacccagtcttcggaggcactttctccccgcagatcggcctggcgcagacccagcaccaccagcagccgccgccgcctgcgcccgcgccgcagccggcacagccagcgcagccaccacaggcgcagcccccgcagcagcgccgctcacccgccagccccagccaggcgccctacgcgcagaggagcgccgccgcggcgtacggccaccagcccatcatgaccagcaagccgtcctcgtcttcggcggttgcagccgctgctgccgcagccgccgcctcgtcggcctcgtccagctggaacacgcaccaaagcgtgaatgcagcctggagcgcaccgtccaacccctggggcggcctgcaggcgggccgggaccctcgccgggcggtcggtgtgggcgtgggtgtgggtgtcggggtgccttccccgctcaaccccatctcgccgctcaaaaagcccttctccagcaacgtgatcgcgccgcccaagttccctcgcgcggcccctctcacttccaagtcctggatggaggataacgctttccggaccgataatggtaacaatctgttgccatttcaggaccggagtaggccctatgatacttttaacttgcactcgttggagaactccttaatggatatgataaggactgatcatgaacctctgaaaggtaaacactaccctcccagtggcccaccaatgagtttcgctgatataatgtggaggaatcattttgcaggacgcatggggataaatttccatcatccaggaacagataatattatggcacttaacaatgccttcctggatgatagccatggtgatcaagccttgtcatctggcttaagttctcccactcgctgtcaaaatggggaacgagtagaacgctactctagaaaggtgtttgttggaggacttcctcctgatattgatgaagatgagatcactgccagctttcgcaggtttggacctctcgtagtagactggcctcacaaagctgaaagcaagtcttattttcctcctaaaggctatgcctttctgctgttccaagaggaaagctcagtacaagctttgatagatgcctgcctagaagaagatgggaaactctacctgtgtgtgtcaagccccaccatcaaggacaagccagtgcaaattcgaccatggaacctaagtgacagtgactttgtaatggatggttctcagcctttggaccccagaaaaactatctttgttgggggagttccacgaccccttcgagctgttgaactggcaatgatcatggaccgtttgtatggtggtgtctgctatgctggcattgatacggacccagagctgaagtaccccaaaggtgctggccgcgtggcattctccaatcagcagagttacattgcagccatcagcgctcgttttgtgcagcttcagcacaatgacattgacaaacgggttgaagtaaagccatatgtgctggatgatcagatgtgtgatgagtgccagggcacacgctgtggtgggaagtttgccccgttcttctgtgccaacgtcacctgtctgcagtattactgtgaatactgctgggcgagcatacattcccgagccgggcgggagttccacaaaccgctggtgaaggagggaggcgaccgccctcgtcacgtcccgttccgctggagctgagccacgggccgacccagccacaagtactggagtagataacaaggagggaaaagagagggcactgcctcagggcttacagtgttctggaaatctgtgcattcgttctcgatttttaaagaagaattgggtctttttattattattattattatttacagtcatattactgaactcagtgtccagtataatgcagaattgcagagtgtagaatggtactgatttgcactttgattcacacctttgtctgcttggtaccttaattttttatacctgatttgtcactcgtgacagtatgtagactgccattctcatcagcggccgtcaggctactgtctgtgattcttttgtttgttgttgtggtgttgttctgattgttttgaactggagcatgcacttattttcagaaacttagagagttgcccctaggacaagacttaccaaaggtaatactcgtgagtaggtggcagatgtagcaaaaacttcacaacaattcagcaatcattagctcgggtcacttagagtaaggataacccttcatgaaaataagcctttagttgctctctattttgacttgtaaggatacctcataagctggatcttttatttttccttcatgtttgatttttgttttgccgaggattttggttagatcttttagtattatgtaaatttatgctgcaatagcttttgctgctattaaaatggtattattaataccataatactctattcaggctaggatatcaattaaacacaaaaacccaacaacacacttttgtgattttagggatagagtcagctgccgaacggagatcagaatagacttcagaaagcttcggtggaaggtcactatttctgactgcatgtttacttaatcaggttgctgcatgcaataaattttatatccaatgtctagtataaaacgttcccacaatgcacaaattaagaatctatataagctataaaaatactcattttttaaaaaaagtttttttcattcaaagaattggtaattgaccggaggaaggcatgcctcaataaatggaatgctctgaatgggaagagcccataacagaatgacctatattacaaccgatataaaacctaggtgtaggatattcttcaagcaaatttgtggatggtagatgaagtactttgcggtgctctgttatatattgtgaaatttattttatatagtaaagtgattatgtctaactgtgatcaaacttaactgtttaaagcctctgtcagacattaatgaacttgacagttcataactgatatattataaactaacacatgagctcttagttacaatctcttagtgcttgcaccattttacatagcttcagaccttgtccagaaaaccaaagagctcatcttagcttacaaacactaagaatatatacaggatatagagataagttgtcagattgacaaactaggcacatttttaagaaagttgtgtaatggtgatgctaaagaaatgtctgtacaaaataagatggcctgggcagagttggttgtctgagtgagaaactaactacttaattccctggatttatcctgttaagcttgagtagaatgaaggcctgctagcactagcgtggtctagaatgaaggcctgctagcactagcgtggacatttttctagcattcacccttgggctgcagatagtaatatataaacacacacaatgattgcaagactatgtaaatctttttttaatcttcttcctatgttttggaattctggggacaatctgactggatatgacactgcagaatagatttaagtcgctgtgttttctgtgctgtgatgtccttgtactgtcttaagttagtgttgcttgtttttgttttgttctcccatgtttagttgcaattactggctctcaagctatagtttgttttcaaaaaggaaaaacaaaatagttttttactggattaaaaatgcttattttagaatcctcccctttttgaggctttttggtaataattgcttttttccagcccaggtgtggttttgtttgtttttttctatgtttgtgggttttttttcatctgtacaagaaattttgttatgcactactactttttgtattctagacagttttcaaaagttggcagatttttttttttgtttttaaggaaaaaggcatgctttctgactgacatgatcttttgcaatacctcaattttgaaatataggaaagaaaatgatattttctaagtaagtttattcagaaaaatatatattaatttaattctgcaagaaaatgatttaacagatgggtaactttatttttttcatgcttatttgtgttttttgaaaatgaagaagttagagctttataactataatattaaagatcatatctaacctacagaaatctacctaattatgtgaaagaagcaaaactttttgaagaagcacccctctttcatgtattaaaataacactgagatttttttaaaagctggaagattgtacagcataaagctaaagtgaaggcaaaaaacattgtcctgaagaataggttacaaaaaataaactccatttggtgctgaaagttgtgaatagatggtggaaactactttcccttaatttgtatatttctaatcaagtgttgattgtgcgcgactgaccaggattgtgaaagagttcttctgtttgtatttttttaaagagaacttttttagtttattaaattataacatgttcccttttgttttgtaaataaatgtgcccccaagttgttaatgttatattaaaagagagggtccttcaaaaaaattattttttaaaacacagaggtgttctgacctgcaacttgactgggaagcccctgggtaacacaggtcctgctgtggcctttccttggtgtgacacttgaactagtcgattttttgaaggctataacctaacctcgactatttgttgttatgtgcaatactgtttgtactgtttgtataaaaaatagaaaaaaaaaagaaaagaaaaaaggcataaatctttattgcagatttattttcattgcaaactttagacattgtgattcactgaaatcatttttctactgtcaaatatgtaccttttcttcatgctggtattttttcaatagtaatgtagcctttgtactgagacaaattttcattgttatttttagaaagattttttgctaagaaaaaaattaaacatatttacatatttttcattttatttcgtattttctttaaggagtgctttctcaatcattaatagagttgtttctgggagggactttcatatctggtcaatgtcataatattattttgtatttttattggaataaattaattttatgatgctaattctttaaaagtttatttttttcattttcagttatttttgaagctaaaacctttgtaatattgttactaaagtgtctagttttttgaaatgcaaagctttatgtattaacttgctgatgtggtttacaatagtgtgacaacgatgaaaatgcttggttatgtaaagtgattggaaatgtaatggataattgggtaataaaatgacagaatgagcag

SEQ ID NO: 75 - DNA, 438 bp, Homo sapiens
atgtctggtcgcggcaaaggcggtaaaggtttgggtaagggaggtgccaagcgtcaccgaaaagtgctgcgggataacatccaaggcatcaccaaaccggccattcggcgccttgctaggcgtggtggggttaagcgaatttccggtttgatttatgaggagactcgtggcgttctcaaggtgtttctggagaacgtgatccgggacgccgtgacctacacggagcacgccaagcgcaagactgtcactgccatggatgtggtttacgcgctcaagcgtcaaggacgcactctgtacggcttcggcggttaatcttttcgtcagttttcttccaatggcccttttcagggccgcccactccctctcagaaagagctgtgattgtattctttcggatggtaacatctcaatggctttactcggctattctgcctagtat

SEQ ID NO: 76 - DNA, 1908 bp, Homo sapiens
agcgccgccgccgccgctgctgcagcagcagctgctctgcagagtggtggccggggccagggccggggtgccctccctcccaccttctcccgccatgagccagggaagtccgggggactgggcccccctagatcccacccccggacccccagcatcccccaaccccttcgtgcatgagttacatctctctcgcctccagagggttaagttctgcctcctgggggcattgctggcccccatccgagtgcttctggcctttatcgtcctctttctcctctggccctttgcctggcttcaagtggccggtcttagtgaggagcagcttcaggagccaattacaggatggaggaagactgtgtgccacaacggggtgctaggcctgagccgcctgctgtttttcctgctgggcttcctccggattcgcgttcgtggccagcgagcctctcgccttcaagcccctgtccttgttgctgccccacactccactttctttgaccccattgttctgctgccctgtgacctgcccaaagttgtgtcccgagctgagaacctttccgttcctgtcattggagcccttcttcgattcaaccaagccatcctggtatcccggcatgacccggcttctcgacgcagagtggtggaggaggtccgaaggcgggccacctcaggaggcaagtggccgcaggtgctattctttcctgagggcacctgttccaacaagaaggctttgcttaagttcaaaccaggagccttcatcgcaggggtgcctgtgcagcctgtcctcatccgctaccccaacagtctggacaccaccagctgggcatggaggggtcctggagtactcaaagtcctctggctcacagcctctcagccctgcagcattgtggatgtggagttccttcctgtgtatcaccccagccctgaggagagcagggaccccaccctctatgccaacaatgttcagagggtcatggcacaggctctgggcattccagccaccgaatgtgagtttgtagggagcttacctgtgattgtggtgggccggctgaaggtggcgttggaaccacagctctgggaactgggaaaagtgcttcggaaggctgggctgtccgctggctatgtggacgctggggcagagccaggccggagtcgaatgatcagccaggaagagtttgccaggcagctacagctctctgatcctcagacggtggctggtgcctttggctacttccagcaggataccaagggtttggtggacttccgagatgtggcccttgcactagcagctctggatgggggcaggagcctggaagagctaactcgtctggcctttgagctctttgctgaagagcaagcagagggtcccaaccgcctgctgtacaaagacggcttcagcaccatcctgcacctgctgctgggttcaccccaccctgctgccacagctttgcatgctgagctgtgccaggcaggatccagccaaggcctctccctctgtcagttccagaacttctccctccatgacccactctatgggaaactcttcagcacctacctgcgccccccacacacctctcgaggcacctcccagacaccaaatgcctcatccccaggcaaccccactgctctggccaatgggactgtgcaagcacccaagcagaagggagactgagtgcctcagcctctcaccccctcctcctcagggcagcgctaggggcctcccctatgcctcagccccatctctgctcctgtttgaattttgttattgttgtttggttgttgtttttttaagttgattttaattttttgtttggttgatttttttgtaaaaaactattttatatataaatataaatctatatctatatctattaaaaaaaatgaagtccagtcatattgatgttaccatta

SEQ ID NO: 77 - DNA, 7230 bp, Homo sapiens
cattttgtctcctgtaacaatttacgcgccgtgtaactgtgaatctttcaaagcctcagttttatgaccctgtggagccagtggactttgaaggacttctgatgacacacctgaacagcctggatgtgcagcttgcccaggagctcggggacttcactgatgacgacttggacgtggtgttcacgccaaaggaatgtaggactttgcagccctctttgccggaggaaggggttgaactggaccctcatgtcagggactgtgttcagacctacatccgtgagtggctaatcgtgaaccggaaaaaccaaggaagtccagaaatctgtggctttaaaaagactggatctcgaaaagattttcacaagacgcttccgaaacagacgtttgagtcggaaaccttggagtgcagtgaacccgctgctcaggcaggcccccgccacttaaacgtgctgtgcgacgtgtctgggaaaggccccgtcactgcctgtgactttgacctccgcagcctgcagcctgacaagcggctagaaaacctcctgcagcaagtgagtgccgaggactttgagaagcagaacgaggaggcccggaggaccaataggcaggccgagctctttgccctttacccatcagtggacgaggaggatgctgtggaaatacgtccagtaccagaatgtcccaaggaacacctgggcaacagaatattggtcaagttgctgaccttgaagttcgagattgaaattgagcccctgtttgccagcattgccctctacgatgttaaagaaaggaaaaagatctcagaaaattttcactgtgacctgaactctgaccagttcaaaggatttctgcgagctcacacgccttcagtggccgcatcaagtcaggcgagatctgcagtcttctcagtcacctacccgtcctcagacatctacctggtagtcaagattgaaaaagtcctgcagcagggagagattggagactgtgcagagccctacacggttatcaaagaaagtgatggtggaaagagtaaagaaaagattgaaaaactaaaactccaagctgaatccttctgccagcgtttggggaaataccggatgccctttgcctgggcacccataagcttatcaagcttcttcaatgtctccacccttgagagggaggtaactgatgtggactctgtggttgggagaagctcagtgggtgaacggaggacattggcccaatctagaaggctttctgaaagagccctctccttggaggaaaatggggttggatccaacttcaaaacctccactctgagcgttagcagctttttcaagcaggaaggagatcgccttagcgatgaagacttattcaagtttttagctgactacaaaagatcatcatccttacagagacgagtcaagtcaattccaggcttgctaagactggagatttctacagctccagagatcatcaattgctgtctgactcctgaaatgctgcccgtgaaaccctttcctgaaaaccggacacgcccgcacaaagagattttggaatttccaacacgagaagtatatgtccctcacactgtgtacagaaaccttctctatgtctacccacagaggctgaactttgtaaacaaactagcatcagcccggaacattacaataaagatccagtttatgtgtggagaagatgctagcaatgcgatgccggtcatctttggaaaatccagcgggcctgaatttctgcaggaagtgtacacagctgttacataccataataagtctcctgacttttatgaagaagtgaaaattaagctccccgctaagctcacagtaaatcaccacctcctgttcaccttctaccatatcagctgtcagcagaagcaaggagcctccgtggaaactctcctgggatattcatggctgccaattctcttaaatgaacgtcttcaaactggatcctactgtctcccagttgccttggaaaaattgccacccaactactccatgcattctgctgagaaagtcccattacagaatcctcccattaagtgggctgaaggacataagggagtatttaatattgaagtgcaagctgtttcttctgtacacacccaggacaaccacctggagaagttcttcaccctctgccactccctggagagccaggtgaccttccccatccgcgtgctggatcagaaaatcagcgagatggcgctggagcatgagctgaagctcagcatcatctgcctgaactcctcccgcctggagccgctcgtgctcttcctgcacctggtgctggacaagctcttccagctgtccgtgcagcccatggtcatcgctggccagacagccaacttctcccagtttgccttcgagtccgtggtggccatcgccaacagtctgcacaacagcaaggacctgagcaaggaccagcatgggaggaactgcctgctggcttcctacgtgcactacgtcttccgcctgccagaggtgcaaagggatgtgcccaagtcaggcgctcccactgccctcctagaccctcggagctaccacacgtatggccgcacatcagctgctgctgtgagttcaaagctgctgcaggcccgggtgatgagcagcagtaacccagacctcgcggggacacactccgcagcagacgaggaagtgaagaacatcatgtcttcaaagatcgccgatcgcaactgcagccgaatgtcttactattgctctggcagtagtgatgctccaagttcacctgcagccccaaggccagccagcaaaaagcatttccatgaggagcttgcccttcagatggtggtcagcaccggaatggtgagagaaacagtcttcaagtatgcctggttcttctttgagcttctggtgaaaagcatggcccagcacgtacataacatggacaaacgggacagttttcggaggactcgtttttctgaccgtttcatggatgacataactactattgttaatgtggtcacctcggaaattgcagcccttttagtaaaaccacagaaggaaaatgaacaggcggaaaagatgaacatcagcctggctttcttcttgtatgaccttctctccctcatggatcggggctttgtgtttaacctcatcagacattattgcagccagctgtcagccaagctcagtaaccttccaacgctcatttccatgaggctagagttcctgagaatcctctgtagccatgagcattacctcaatctgaaccttttttttatgaatgctgatactgctccaacatctccttgtccttccatatcttcccagaactcaagctcctgctccagcttccaggaccagaagatcgccagcatgttcgatctgacttccgagtaccgccagcagcacttcctcaccgggctcctcttcacagaactggctgctgccctggatgccgaaggggaaggaatcagcaaagtacaaaggaaagctgtcagtgcaattcacagcctgctaagttctcacgacctggacccacgctgtgtcaaaccagaggtgaaggtcaaaatcgccgccctttacctacctttagttggcatcattttggatgctttgccacagctctgtgactttacagttgcagatactcgcagataccgcaccagtggctcggatgaagaacaagaaggagccggtgccattaaccagaatgtggctctggccatagcagggaataatttcaatttgaaaacaagtggaatagtgctgtcttccttgccctataagcagtacaacatgctgaacgcggacactactcgcaacctcatgatctgcttcctctggatcatgaaaaatgctgatcagagcctcattaggaagtggattgctgacctgccatcaacgcagctcaacaggattttagatctacttttcatctgtgtgttatgttttgagtataagggaaaacagagttctgacaaagtcagtacccaagtcctgcagaagtcaagggatgtcaaggcccggctggaagaggctttgctccgtggggaaggggccagaggggagatgatgcgccgccgggctccagggaacgaccgatttccaggcctaaatgaaaatttgagatggaagaaagagcagacacattggcggcaagctaatgagaagctagataaaacaaaggccgagttagatcaagaagccttgatcagtggcaatctggctacagaagcacatttaatcatcctggatatgcaggaaaacattatccaggcgagctcggctctggactgtaaagacagcctgctgggaggtgttctgagggtgctggtgaattctctgaactgtgatcagagtaccacctacctgactcactgctttgcaacactccgtgctctcatcgccaagtttggagacttactctttgaagaggaggtggaacagtgtttcgacctatgtcaccaagtcctgcaccactgcagcagcagcatggatgtcacccggagccaagcctgtgccaccctttacctcctcatgaggttcagttttggagccaccagtaattttgcaagagtaaagatgcaagtaaccatgtccctggcatctttggtgggaagagcaccagactttaatgaagagcacctgagaagatccttgaggacaattttggcctattcagaagaggacacagccatgcagatgactccttttcccacccaggtggaggaacttctctgtaatctgaatagcatcttatatgacacagtgaaaatgagggaatttcaggaagatcctgagatgcttatggatctcatgtacagaattgccaagagttaccaggcatctcctgatctgcggctgacctggctccagaacatggcagagaaacacaccaagaagaagtgctacacggaggctgccatgtgcctggtgcacgccgctgcgttagtggctgagtatctgagcatgctggaggaccacagctacctgcccgtgggcagtgtcagcttccagaatatttcttccaatgtgctggaggagtctgtggtctctgaggacaccctgtcacctgacgaggatggggtgtgcgcaggccagtacttcaccgagagtggcctggtaggcctcctggagcaggccgcggagctcttcagcacgggaggcttatatgagacagttaatgaggtctacaagctggtcatccccatcctagaagcgcatcgagaattccggaagctgacactcactcacagcaagctgcagagagccttcgacagcatcgttaacaaggatcataagagaatgtttggaacctacttccgagttggtttctttggatccaaatttggggatttggatgaacaggagtttgtctacaaagagcctgcaattaccaagcttcctgagatctcacatagactagaggcattttatggtcaatgttttggtgcagaatttgtggaagtgattaaagactccactcctgtggacaaaaccaagttggatcctaacaaggcctacatacagatcacttttgtggagccctactttgatgagtatgagatgaaagacagggtcacatactttgagaagaatttcaacctccggaggttcatgtacaccaccccgttcaccctggaggggcggcctcggggagagctgcatgagcagtacagaaggaacacagtcctgaccactatgcacgccttcccctacatcaagaccaggatcagcgtcatccagaaggaggagtttgttttgacaccgattgaagttgccattgaagacatgaagaagaagaccctgcagttagcagttgccattaaccaggagccgcctgatgcaaagatgcttcagatggtgctgcaaggctctgtgggagctactgtaaatcagggaccactggaagtagcccaagtgtttttggctgaaattcctgctgatccaaaactctatcgacatcacaacaagttgaggttatgctttaaggaattcatcatgagatgtggtgaagctgtagagaaaaacaagcgtctcatcacggcagaccagagggaatatcagcaggaactcaaaaagaactataacaagctaaaagagaacctcaggccaatgatcgagcggaaaattccagaactgtacaagccaatattcagagttgagagtcaaaagagggactccttccacagatctagtttcaggaaatgtgaaacccagttgtcacagggcagctaagaaaagccatcttcattcgtggagactgtggccctgcaaccctggagaaggacttgctggtacttaaaaaatgggacatttgccacccaggactgactgtacactccctgatcagccagcactctggaagctttgggatcccaggaaccatggaattattcccaaatggactctgaccagatttttgccatactggggggtggcgggatggaggatgggtactcaggcatgactgcgtatttattaaagtgtgtttttccacaatgtaccaaacaaggcataagcagcttctcctgctgactggccaatcactgcccatctgagagatgatttcctctggcccatatttgaatttattggagtaactcaaattgcctgaggaaaaatggaaaaattatccaccagtcgattcaaactgaatttcactctttataggaaggcagggcaaacttgtaggagtacgaaacattttcaataaatctacaaagggaagccttactacaattccaaaaatcatcatggttggaaatttgggaggagattatttgtgaacttgttacccttttggtaatggtggactaattgctgtatagttatttttgttttattattactgttacattaatttaacatgcatttatagaagaatacattcaaagcactgatgtaggagatacacggtacttggagcagtcagccagaaatcacagatactgctttcacttaaatggaaacaattctccgataatgctttgctttttttcttatgtcactcttgtgtactatctatttttctcctctctgggaccaagtttctttttataaagcaataatatctctgttttcatttcagaacattgtgctgtctgtcagcatatgtatatcagctacaaaatatattcaactttgacttcttttgacaaaggactttaggaaaaagaggaacaaagacattatttgagaattaaattatatatttttaatatgactgtgaccttgactgataataaagatgtaataagaattgcaagct

SEQ ID NO: 78 - DNA, 3158 bp, Homo sapiens
cccacgcacgggcctcggacgcatttccagccccggcgttggttgtggatgctggacatccaccgcctccaggcagtttcgccgtcacaccgtcgccatctgtagccaaagcaaaacatatcctaactgagactttgcagctcttgtggccactctgggctcaccgggaacatgagtggaagagcccgagtgaaggccagaggcatcgcccgcagccccagtgccacagaagtggggcgcatccaagcctcgccattgcctagatctgttgatcttagtaacaatgaagcatcctctagcaatggcttcttgggaacaagcaggatctcaaccaacgataaatatgggatatcttctggtgatgctggaagtaccttcatggaaagaggtgtgaaaaacaaacaggactttatggatttgagtatctgtaccagagaaaaattggcacatgtgagaaattgtaaaacaggttccagtggaatacctgtgaaactggttacaaacctctttaacttagattttccccaagactggcagctataccagtaccatgtgacatatattccagatttagcatctagaaggctgagaattgctttactttatagtcatagtgaactttccaacaaagcaaaagcattcgacggtgccatcctttttctgtcacaaaagctagaagaaaaggtcacagagttgtcaagtgaaactcaaagaggtgagactataaagatgactatcaccctgaagagggagctgccatcaagttctcccgtgtgcatccaggtcttcaatatcatcttcagaaagatcctcaaaaagttgtccatgtaccaaattggacggaacttctataatccttcagagccaatggaaattccccagcacaaattatccctttggcctgggtttgccatttctgtgtcatattttgaaaggaagctcctgtttagtgctgatgtgagttacaaagtcctccggaatgagacggttctggaattcatgactgctctctgtcaaagaactggcttgtcctgtttcacccagacgtgtgagaagcagctaatagggctcattgtccttacaagatacaataacagaacctactccattgatgacattgactggtcagtgaagcccacacacacctttcagaagcgggatggcaccgagatcacctatgtggattactacaagcagcagtatgatattactgtatcggacctgaatcagcccatgcttgttagtctgttaaagaagaagagaaatgacaacagtgaggctcagctcgcccacctgatacctgagctctgctttctaacagggctgactgaccaggcaacatctgatttccagctgatgaaggctgtggctgaaaagacacgtctcagtccttcaggccggcagcagcgcctggccaggcttgtggacaacatccagaggaataccaatgctcgctttgaactagagacctggggactgcattttggaagccagatatctctgactggccggattgtgccttcagaaaaaatattaatgcaagaccacatatgtcaacctgtgtctgctgctgactggtccaaggatattcgaacttgcaagattttaaatgcacagtctttgaatacctggttgattttatgtagcgacagaactgaatatgttgccgagagctttctgaactgcttgagaagagttgcaggttccatgggatttaatgtggactaccccaaaatcataaaagtacaagaaaatccagctgcatttgttagagctatacagcaatatgttgatcctgatgttcagctggtaatgtgcattctgccttctaatcagaagacctattatgattccattaaaaaatatttgagctcagactgcccagtcccaagccaatgtgtgcttgctcggaccttgaataaacagggcatgatgatgagtatcgccaccaagatcgctatgcagatgacttgcaagctcggaggcgagctgtgggctgtggaaatacctttaaagtccctgatggtggtcggtattgatgtctgtaaagatgcactcagcaaggacgtgatggttgttggatgcgtggccagtgttaaccccagaatcaccaggtggttttcccgctgtatccttcagagaacaatgactgatgttgcagattgcttgaaagttttcatgactggagcactcaacaaatggtacaagtacaatcatgatttgccagcacggataattgtgtaccgtgctggtgtaggggatggtcagctgaaaacacttattgaatatgaagtcccacagctgctgagcagtgtggcagaatccagctcaaataccagctcaagactgtcggtgattgtggtcaggaagaagtgcatgccacgattctttaccgaaatgaaccgcactgtacagaaccccccacttggcactgttgtggattcagaagcaacacgtaacgaatggtatgacttttatctgatcagccaggtggcctgccggggaactgttagtcctacctactataatgtcatctatgatgacaacggcttgaagcccgaccatatgcagagacttacattcaaattgtgccacctgtactacaactggccgggcatagtcagtgtcccagcaccatgtcagtatgctcacaagctgacctttctggtggcacaaagcattcataaagaacccagtctggaattagccaaccatctcttctacctgtgatggcatgaactactggcatcactagatggacaatccaagaagaaattggtatactttgtgcaaatctgccataagctcaaggctgtgactggggaaaaagattgagcttagttttcatgtctaggaaaaaaagcaaaacaacttaatctgaaacagttttaaaaaatgtgtgttattttgttttaaagagttgtatgcttggggtaaattttcattgtcatatgtggaatttaaatataccatcatctacaaagaattccacagagttaaatatcttaagttaaacacttaaaataagtgtttgcgtgatattttgatgacagataaacagagtctaattcccaccccaaattttgctgaggttttcttaatgttgtagagcattttgtagagtggtttaaatagttgaaaataaagttcagaacatc

SEQ ID NO: 79 - DNA, 5685 bp, Homo sapiens
gcccagacgcacaccgcgcatgctccgagcgcggcgcccccgacgcggcgctcggctcggctcgggcatttccgcctctttgttttaaactccggacgggcttttttctcctcctcttgggggggacccagagggagcggcgccccctcccccctccggcgcggaccccgcgtgcgccttgctcgcccgcagccccgagaccgcaggcgtcacaatgtagcagggaccccaggcgtcgtgctcagaaaatggaaaaagagccagggccggaaggagggtgcagaagcgagtccgcgtgcggagccaggaggcagcgtcgcgtgggagtgctggcctgaagcctccatgccccggcagagggacggacacgcggacgtctagcggagaagccaaagatgttgaccaggaagatcaagctgtgggacatcaacgcccacatcacctgccgcctgtgcagcgggtacctcatcgacgccaccacggtgaccgagtgtctgcacaccttctgcaggagctgcctggtgaagtacctggaggagaacaacacctgccccacctgcaggattgtgatccaccagagccaccccctgcagtacatcggtcatgacagaaccatgcaagatattgtttacaaattggtaccaggcctccaagaagcggaaatgagaaagcagagggagttctatcacaaattgggcatggaggtgccgggagacatcaagggggagacctgctctgcaaaacagcacttagattcccatcggaatggtgaaaccaaagcagacgacagttcaaacaaagaggccgcggaggagaagccggaggaggacaacgactaccaccgcagcgacgagcaggtgagcatctgcctggagtgtaacagcagcaaactgcgcgggctgaagcggaagtggatccgctgctcagcccaggcgaccgtcttgcatctgaagaagttcatcgccaaaaaactcaacctttcatcctttaacgagctggacattttatgcaacgaggagatcctgggcaaggaccacacactcaagttcgtggttgtcactaggtggagattcaagaaggcgccgctcctgctgcactacagacccaagatggacttgctgtgaatggtgccacacagcgcccacagactgggccctcgcacccttgggtgctcccggccgccgcgcttaagaacattgcctctgggtgtcatgtggaccagacttctgaatagagaatatttataacttttgtatgagagagaattcacactcaacaagacactaccagcaccacgtttacagaggatgaaaacacttcacagtctcccagagccgatcgtcctctcccccgccccaccccgtgcttcagccttgcagggagagtgatgctccaggcaacacggttctgagtcaccttctgacacgagctccctctgcttgctttccaggtcttgaaaatctgaattcacttcagtttagtttatgaattttaggtttcatgataagcctcaagtgtagttggacttttattgaatccttcctaagttattgaaaaaatgtcttttcatggtgaatgacaatatttatgttgcctttagcttcttgaagatttagaagttatataaaaaattaatttaaaagcaaaccaaaagaggtttccattaacattatgatttaaccattgtatttaatttcccaccttatgaaacacaacagcagctccctgactggttcgcctttcattgtgtgaggtcggcacttggactcactcagaactgtcgctcacctgtggctgacacacccagccctggaaacggggccccagacgccacgtcgggatttctgacatgctcagcaggtagaccagaggccgtgtgaccagctcagtgctggtttacggaacaactcttacttttaaaaattacttgttcccccaaattgttgagtgccgccgtttggtttcctatgttttctttccctgttttgattttgctgaagggagaggtggtggtggttaggatcagagctctcctggcatccgtggggaggatttgctggtggtggcttcgggctcatgcccagacacactcactgccccgtctgtccaaggcctccccttcccctttgctggtgggaggagctcgtgtgctccttggccgcttactggaagggcgtttttcagagctgcagggacagggtgagcagctgaagggctaggagggaagccggcccccgctctgcagaagctgcatttcagctgaatctgtgtttcagcctcagttggttgcaccgttagcccctctcctcccggatggtcatgtttttgtcacattagagaataaacagccacacacacatttttttttttcctttaaaacagtaacttggaaatatgaaaaggccagaaggaggagcaagggctgttttctggagtggttgaggtgttgtcctgcagttgtcattgtcttctccaccgggctgttcccatttatttcctgtggaactgaatccctcctccctccactccttgggagcccaggtggtccttggccaccattcaggctttccaagaagccaaccaccttggagattttttttcttgaatttcgctgttttcttctgcttcctttagataaaaagcagctcaagagaccttatcttagggatgagaaaaacatgcatattaattccatctgagtgattgtcagtgtaaggccttttaaaacaaaagcaagttctttgttaggaattggtcaaaattcatctctttctttaagcccatcaactcccaggacggtttgagttactcagttacctaagcttgctattcatccaaatcattttctagagtcactgtataagggtctatgagtagctgtgtatgaataaatattacctgtctacctcaaaatacacatactgctgaagcattctgtacaaccgtgtgttatcacagtgcagttttaagtgtaacgttagaacttaggcattttcctgtgtggcggaataagaaaggattaaacagttacaagcctccaaattcaaataaaattaaatcacagttcagatgaaactgaatatcattgtaataatctcataatatatatttgtaactttgtagctatctttgaaatcacttgactttgcaatggtgctaagctgatagatttaaatacacagacgggcgagtggcgcccgtgtcgatgtcttcagccagtggtgaccctgcttttgtaaccgcgttaacctgacaaaacctcagcagcagaagtccctatttttctaggagttcatcgtgcagacagtcttcactacaggactcggccctggggcctctgcctctcgtctgaccttgcagccttagtcgttggaggctggagcgcaatggccctgccgtctgtggagcctctgggcggccttctttcctttctgtcaacctctcatttcacagaaaaaggctgaatttcattttttccagcatgaaagccaggatcggttagtggttggattctattggttttttttttttaaacagatggagttactgtgaagaagttttcacaactatttatgctggtaaaacaaatgctgttaaatcaccttatgcgtcgttttcaacagcagtggggctaattacccggaatacggtctcaccgatgcagttttcatggacatagaaaattcaaatagaatatataatattgaatttaagatttggggggttaaaaaagaaaacttaactttataaaattatttattctattttaagccttctatcatattttcccatccaattgtttggtttcagtggtccagctttatttacaggcatataaaatgaaattgtgagatgttttgcaagcttctttttactttgagtagcttttaatttgtatgtttttatgtggatgaagagcattttttatgcttttgtgcaataggttccaatatgcatttattagacatctgtttaaatggtaatgtagcatttattttgctaaattgaaagggaacatagatggaattccaaaatatgtacattcagctgtttggtttttcgtttttcattgttattattgtgagaatgctgttattggggttgtgtgtgagtgcccgtcagccagtgatgcctcgggccacgctgtggggccacctcagtcctgcctgggtcctggtgccttggaccccacgtgcttgtggccaggctgcccctgggcagggccatgtggcctcagaccacaagagcggagctgccctggcccaagcactgcagctgcctgcacccccgggcttcgcagccttgcttgttttctctgaacagcaacagaacagtgttcacagcgattcaaagggtggcattgggttggacgttctgggtacaagccaacctagtcccacgttgtacgtgaatgtttaatgtgctctcaaaacatggaaaataagtttagtgcacatagctaaatcacaaaacatccaatttctctgtttcctcaggaagtcattactgcgccaccacatcacatgaccttaacatgatcaatgtatttctctgccttgacatttaaatacataaattgagataagtagattagaaaatcattcaaatgataccataatttgtacgggacagggtgcgggcaatggccacgtggccaaggccctgcaggaacgcgccgaggtctccctcaccctccaggtgtccttcgcacccaacagtgcgtctgaggaacgagctgcagtttgagcgttcccctgagatgtgcgtagcctccgtgtaaatgtccactcccatggcttaattgcctatcagacgcattttcccagacgaaagcaatgttgggttggggaagacagtgcagccacccagcctttaccagcagcgtacggcagacgaaggcagtcgaggtgtggaggtgatcacgaagatacatgtgtttgactgtttaatttgaaagtttacattttttatgctttgtgttggtgtgtaatttttgtactcttggtggctagtttttgtcaaatcttttttggaatattgcttaaatgttttgattttatgatagtgaagcttgtattcagtgttttgccaattaatattatatgcttgtaataaaagcaaaagaaaagcttaagtgaaagtgtttctggctggaaatgtattacataaatcatttgtatgagcatgagagatgacttgctcatgggatgagcaatgctgtgggtattggatggaccactcaggcagcctggccgcacacacacacatgcatgctacatatgtgtacgctcagaccacatgcctgcacatatgtccacacaccagcccacggctcccttcctcaccccagccctccccactcccaggttaaccaatgtctcgatttgcttcaggcggcatttgtaaactgtcaccctgcttgcaaaccctcatttaaattggtccagcatttgctaccagagtttaggccacaaactttgtaaagctcagtttgtctccttgcagaaagaggttgctgcagtttggagctggttatgccaaggaaaatacggctaaaaaagaacttactgattcccataggtgtgtcaactgacaaatgaatgttccatctccctacgacaatttgctgcccctccccaaaaaaagcactatggccaaaatttcagtttttaaaggttaagtaaa

SEQ ID NO: 80 - DNA, 2043 bp, Homo sapiens
aggtttctgctgggtttctgaactgctgggtttctgcttgctcctctggagatgcagcgtctgttgactccagtgaagcgcattctgcaactgacaagagcggtgcaggaaacctccctcacacctgctcgcctgctcccagtagcccaccaaaggttttctacagcctctgctgtccccctggccaaaacagatacttggccaaaggacgtgggcatcctggccctggaggtctacttcccagcccaatatgtggaccaaactgacctggagaagtataacaatgtggaagcaggaaagtatacagtgggcttgggccagacccgtatgggcttctgctcagtccaagaggacatcaactccctgtgcctgacggtggtgcaacggctgatggagcgcatacagctcccatgggactctgtgggcaggctggaagtaggcactgagaccatcattgacaagtccaaagctgtcaaaacagtgctcatggaactcttccaggattcaggcaatactgatattgagggcatagataccaccaatgcctgctacggtggtactgcctccctcttcaatgctgccaactggatggagtccagttcctgggatggtcgttatgccatggtggtctgtggagacattgccgtctatcccagtggtaatgctcgtcccacaggtggggccggagctgtggctatgctgattgggcccaaggcccctctggccctggagcgagggctgaggggaacccatatggagaatgtgtatgacttctacaaaccaaatttggcctcggagtacccaatagtggatgggaagctttccatccagtgctacttgcgggccttggatcgatgttacacatcataccgtaaaaaaatccagaatcagtggaagcaagctggcagcgatcgacccttcacccttgacgatttacagtacatgatctttcatacacccttttgcaagatggtccagaagtctctggctcgcctgatgttcaatgacttcctgtcagccagcagtgacacacaaaccagcttatataaggggctggaggctttcggggggctaaagctggaagacacctacaccaacaaggacctggataaagcacttctaaaggcctctcaggacatgttcgacaagaaaaccaaggcttccctttacctctccactcacaatgggaacatgtacacctcatccctgtacgggtgcctggcctcgcttctgtcccaccactctgcccaagaactggctggctccaggattggtgccttctcttatggctctggtttagcagcaagtttcttttcatttcgagtatcccaggatgctgctccaggctctcccctggacaagttggtgtccagcacatcagacctgccaaaacgcctagcctcccgaaagtgtgtgtctcctgaggagttcacagaaataatgaaccaaagagagcaattctaccataaggtgaatttctccccacctggtgacacaaacagccttttcccaggtacttggtacctggagcgagtggacgagcagcatcgccgaaagtatgcccggcgtcccgtctaaaggtgttctgcagatccatggaaagcttcctgggaaacgtatgctagcagagcttctccccgtgaatcatatttttaagatcccactcttagctggtaaatgaatttgaatcgacatagtagccccataagcatcagccctgtagagtgaggagccatctctagcgggcccttcattcctctccatgctgcaatcactgtcctgggcttatggtgctatggactaggggtcctttgtgaaagagcaagatggagcaatggagagaagacctcttcctgaatcactggactccagaaatgtgcatgcagatcagctgttgccttcaagatccagataaactttcctgtcatgtgttagaactttattattattaatattgttaaacttctgtgctgttcctgtgaatctccaaattttgtaccttgttctaagctaatatatagcaattaaaaagagagaaagagg

SEQ ID NO: 81 - DNA, 10686 bp, Homo sapiens
gcgagtttattgggcttgttttctgttttctagggagtaggttagtggaaaagaaaaagggccgaattcactcccacgacctctacagccgcccctgaggggaagcggtcagcgtaagtcccggatccccgctccggagccgcctcgtgggagcggggcaaggagatccaggaggggtctcgaatctgccatggcgaaccggcgagtggggcgaggctgctgggaagtgagcccgaccgagcggaggccgcccgcggggctgcggggccccgcggccgaggaggaggcgtcttccccgccggtcctgtctctcagccacttctgcaggtctcctttcctttgcttcggggacgttctcctgggagcctcacggacgctgtctctggccctagacaaccctaacgaggaggtggcagaagtgaagatctcccacttcccggccgcggacctgggcttcagtgtgtcgcagcgctgtttcgtgttgcagcctaaagagaaaattgttatttctgttaactggacaccactcaaagaaggccgagtaagagagattatgacatttcttgtaaatgatgttctgaaacaccaagctatattactaggaaatgcagaagagcagaaaaagaaaaagaggagtctttgggataccattaaaaagaagaaaatttcagcctctacaagtcacaacagaagggtttcaaatattcagaatgttaataaaacatttagtgtttcccaaaaagttgacagagttaggagcccactacaagcttgtgaaaacttggctatgaatgaaggcggtcccccaacagaaaacaattctttaatacttgaagaaaataaaatacccatatcacctattagccctgctttcaatgaatgccatggtgcaacttgcttgccactctctgtacgtcgatctactacctactcatctcttcatgcatcagaaaatagggaactattaaatgtacacagtgccaacgtttcaaaagtttcttttaatgagaaagctgtaactgaaacttcctttaattccgtaaatgttaatggccaaagaggagagaatagtaaacttagtcttacccccaactgttcttcaactttgaacattacacaaagccaaatacattttctaagtccagattcttttgtaaataatagtcatggagctaataatgaactagaattagtaacatgtctttcatcagatatgtttatgaaagataattcacagcctgtgcatttggaatcaacaattgcacatgaaatttatcagaaaattttaagtccagattctttcataaaagataattatggactaaatcaggatctagaatcagagtcagttaatcctattttatcccctaatcaatttttaaaagataacatggcatatatgtgtacatctcagcaaacatgtaaagtaccattatcaaatgaaaattctcaagtcccacagtctcctgaagattggagaaaaagtgaagtttcgccacgtattcctgaatgtcagggttcaaaatctcccaaagctatttttgaagaactagtagaaatgaagtcaaattactacagttttataaaacaaaataatcctaaattttctgcagttcaggatatttctagtcatagccacaataaacaacctaagagacgtccaatactttctgccactgttactaaaaggaaggccacctgtaccagagaaaaccaaactgagattaataaaccaaaagcaaaaagatgtctcaacagtgcagtgggtgaacatgaaaaagtaataaataatcaaaaggaaaaagaagattttcattcttatcttccaattatagatccaatattaagtaaatctaagagttataaaaacgaggtaacaccctcttcgacaacagcttcagttgctcggaaaagaaagagcgatggaagcatggaagatgcaaatgtgagagttgcaattacagaacatacagaagtgcgagaaatcaaaagaatccatttttctccctcagagcctaaaacatcagctgttaagaaaacaaaaaatgtgacaacacccatctcaaaacgtattagcaacagagagaaattaaacctgaagaagaaaactgatttatcaatattcagaactccaatttctaaaacaaacaaaaggacaaaacccattatcgctgtggcacagtccagtttgaccttcataaaaccattaaaaacagatattcccagacacccgatgccatttgctgcaaaaaacatgttttatgatgaacgctggaaggaaaagcaggaacagggcttcacttggtggttaaattttatattaacccctgatgacttcactgtaaaaacaaatatttctgaagtaaatgctgctactcttcttttgggaatagagaatcaacataaaataagtgttcctagagcacctacaaaagaggaaatgtctctcagagcttatactgctcggtgtaggttaaacagactacgtcgtgcagcatgccgtttgtttacttctgaaaaaatggttaaagctattaaaaagcttgaaattgaaattgaagctaggcggttaattgttcgaaaagatagacacctatggaaagatgtgggagaacgtcagaaagtcctgaattggctgttgtcctacaatcctttgtggcttcgaattggtctagagacaacttatggagaactcatatctttggaagataacagtgatgtcacagggttggctatgtttattctgaatcgcctactttggaatcctgatatagcagctgagtatagacaccccactgttcctcacctgtatagagatggtcatgaagaagctttgtccaagtttacattgaaaaagttattgttgttggtctgttttcttgattatgctaaaatttccagactcattgatcatgatccttgtctcttctgtaaagatgccgaattcaaggctagtaaagaaatccttttggctttttcacgagatttcctaagtggtgaaggtgacctttcccgtcaccttggcttattgggattacctgttaaccatgttcagacaccatttgatgaatttgattttgccgttacaaatcttgccgtagacttgcaatgtggagtgcgccttgtgcgaaccatggaacttctcacacagaactgggacctctcaaagaaactcaggattccggcaataagtcgtcttcaaaagatgcacaatgttgacattgttcttcaagttcttaaatcacgaggaattgaattaagtgatgagcatggaaatacaattctatctaaggatattgtggataggcacagagaaaaaactctcaggttgctttggaaaatagcgtttgcttttcaggtggatatttcccttaacttagatcaattaaaggaagaaattgcctttctaaaacacacaaagagtataaagaaaacaatatctctactatcatgccattctgatgatcttattaataagaaaaaaggcaaaagggatagtggttcctttgaacaatatagtgaaaacataaagttattgatggattgggtaaatgctgtttgtgccttctataataaaaaggtggagaattttacagtgtctttctcagacggccgtgtgttatgttacctgatccaccattaccatccttgctatgtgccatttgacgctatatgtcagcgtactactcaaactgtggaatgtacgcaaactggttcagtggtattaaattcatcatctgaatctgatgacagttctctggatatgtctcttaaagcatttgatcatgaaaatacttcagagctatacaaagagctcctagaaaatgaaaagaaaaattttcacttggttaggtctgcagttagagaccttggtggaatacctgctatgattaatcattcagatatgtcaaatacaattccagatgaaaaggtggttattacctatttgtcatttctttgtgcaaggcttttggatcttcgtaaagaaataagagctgctcgactcatacaaacaacatggagaaaatataaactaaaaacagatctcaaacgccatcaggagagagagaaagctgcaagaattattcaattggctgtaatcaattttctagcaaaacaaagattgagaaaaagagttaatgcagcactcgtcattcagaaatattggcgaagagtcttagcacagagaaaattattaatgttaaaaaaggaaaagctggaaaaagttcaaaataaagcagcatcacttattcagggatattggagaagatattccactagacaaagatttctgaaattgaaatattattcaatcatcctgcaatctaggataagaatgataattgctgttacatcttataaacgatatctttgggctacagttacaattcagaggcattggcgtgcttatttaagaagaaaacaagatcaacaaagatatgaaatgctaaaatcatcaactcttataatccaatctatgttcagaaaatggaagcaacgtaaaatgcaatcacaagtaaaagctacagtaatattgcaaagagcttttagagaatggcatttaagaaaacaagctaaagaagaaaattctgctattatcatacaatcatggtatagaatgcataaagaattacggaaatatatttatattagatcttgtgttgttatcattcagaaaagatttcggtgctttcaagcccaaaagttatataaaagaagaaaagagtccatactaaccatccagaagtactacaaagcatatctgaaaggaaagattgagcgcaccaactatttgcagaaacgagctgcagccattcaattacaagctgcttttaggagactgaaagctcataatttatgtagacaaattagagctgcttgtgttattcagtcatactggagaatgagacaagacagagttcgatttttaaaccttaagaagactattatcaaatttcaggcacatgtaagaaaacatcaacaacgacagaaatataagaagatgaagaaagcagctgttataattcagactcatttccgagcttatatttttgccatgaaagttctagcatcttaccagaaaacacgctctgctgtcattgtgctgcagtctgcatatagagggatgcaagccaggaaaatgtatattcacatcctcacatctgttataaagattcaatcatattatcgtgcttatgtttctaaaaaggaatttttgagcctaaaaaatgctacaataaaattgcagtcaactgttaagatgaaacaaacacgtaaacaatatttgcatttaagagcagctgcactatttatccagcaatgttaccgttccaaaaaaatagctgcacaaaagagagaagagtatatgcagatgcgggaatcttgtatcaaactgcaagcatttgttagaggataccttgtccgaaagcagatgaggttacaaagaaaagctgttatttcactacagtcttatttcagaatgagaaaggctcggcagtattatctgaaaatgtataaagcaattattgtcattcagaattactatcatgcatacaaagcacaggtcaatcagaggaagaacttcttgcaagtcaaaaaagcagctacttgcttgcaagcagcttacagaggttataaagtacgccagctaatcaaacaacaatctatagctgctcttaaaattcagtctgcttttagaggctataataaaagggtaaaatatcaatctgtgcttcaatctataataaagattcagagatggtacagggcgtacaagactcttcatgatacaagaacacattttttgaagacaaaggcagctgtgatttccctccagtctgcttatcgtggctggaaggttcggaaacagattagaagggaacatcaagctgccttgaagattcagtctgcttttagaatggccaaggcccagaaacagtttagattgtttaaaacagcagcattagtcatccagcaaaatttcagagcatggactgcaggaaggaagcaatgtatggagtatattgaactccgtcatgcggtactggtgcttcaatctatgtggaagggaaaaacactgagaagacagcttcaaaggcaacataaatgtgctatcatcatacagtcatactatagaatgcatgtgcaacaaaagaagtggaaaatcatgaaaaaagctgctcttctgattcaaaagtattatagggcttacagtattggaagagaacagaatcatttatatttgaaaacaaaagcagctgtagtaactttacagtcagcttatcgtggtatgaaagtgagaaaaagaataaaggattgcaacaaagcagcagtcactatacagtctaaatacagagcttacaaaaccaaaaagaaatatgcaacctatagagcttcagctattataattcagagatggtatcgaggtattaaaattacaaaccatcagcataaggagtatcttaatttgaagaagacagcaattaaaatccaatctgtttatagaggtattagagttagaagacatattcaacacatgcacagggcagccacttttattaaagccatgtttaaaatgcatcagtcaagaataagttaccatacaatgagaaaagcagctattgttattcaagtaagatgtagagcatattatcaaggtaaaatgcagcgtgaaaagtacctgacaattttgaaagctgttaaagtccttcaggcaagttttagaggagtaagagttagacggactcttagaaagatgcagactgcagcaacactcattcagtcaaactacagaagatacagacagcaaacatactttaataagttaaagaaaataacaaaaacagtacagcaaagatactgggcaatgaaagaaagaaacatacaatttcaaaggtataacaaactgaggcattctgtaatatacattcaggctatttttaggggaaagaaagctagaagacatttaaaaatgatgcatatagccgcaactctcattcagaggagatttagaactctaatgatgagaagaagattcctctctctcaagaaaactgctattttgattcagagaaaatatcgggcacatctttgtacaaagcatcacttacagttccttcaggtacaaaatgcagttattaaaatccagtcatcatacagaagatggatgataaggaaaaggatgcgagagatgcacagggctgctactttcatccagtctactttcagaatgcacagattacatatgagatatcaggctttgaaacaggcctccgttgtgatccaacagcaataccaagcaaatagagctgcaaaactgcagaggcagcattatctcagacaaagacactctgctgtgatccttcaggctgcattcaggggtatgaaaactagaagacatttgaagagtatgcattcctctgcaacccttattcagagtaggtttagatcattactggtgaggagaagattcatttccctcaaaaaagctactatttttgttcagaggaaatatcgagccaccatttgtgccaaacataaattgtaccaattcttgcacttaagaaaggcagccattacaatacagtcatcttacagaagactgatggtaaagaagaagttacaagaaatgcaaagggctgcagttctcattcaggctactttcaggatgtacagaacatatattacatttcagacttggaaacatgcttcaattctaattcagcaacattatcgaacatatagagctgcaaaattacaaagagaaaattatatcagacaatggcattctgctgtggttattcaggctgcatataaaggaatgaaagcaagacaacttttaagggaaaaacacaaagcttctatcgtaatacaaagcacctacagaatgtataggcagtattgtttctaccaaaagcttcagtgggctacaaaaatcatacaagaaaaatatagagcaaataaaaagaaacagaaagtatttcaacacaatgaacttaagaaagagacttgtgttcaggcaggttttcaggacatgaacataaaaaaacagattcaggaacagcaccaggctgccattattattcagaagcattgtaaagcctttaaaataaggaagcattatctccaccttagagcaacagtagtttctattcaaagaagatacagaaaactaactgcagtgcgtacccaagcagttatttgtatacagtcttattacagaggctttaaagtacgaaaggatattcaaaatatgcaccgggctgccacactaattcagtcattctatcgaatgcacagggccaaagttgattatgaaacaaagaaaactgcaattgtggttatacagaattattataggttgtatgttagagtaaaaacagaaagaaaaaactttttagcagttcagaaatctgtacgaactattcaggctgcttttagaggcatgaaagttagacaaaaattgaaaaatgtatcagaggaaaagatggcagccattgttaaccaatctgcactctgctgttacagaagtaaaactcagtatgaagctgttcaaagtgaaggtgttatgattcaagagtggtataaagcttctggccttgcttgttcacaggaagcagagtatcattctcaaagtagggctgcagtaacaattcaaaaagctttttgtagaatggtcacaagaaaactggaaacacagaaatgtgctgccctacggattcagttcttccttcagatggctgtgtatcggagaagatttgttcagcagaaaagagctgctatcactttacagcattattttaggacgtggcaaaccagaaaacagtttttactatatagaaaagcagcagtggttttacaaaatcactacagagcatttctgtctgcaaaacatcaaagacaagtctatttacagatcagaagcagtgttatcattattcaagctagaagtaaaggatttatacagaaacggaagtttcaggaaattaaaaatagcaccataaaaattcaggctatgtggaggagatatagagccaagaaatatttatgtaaagtgaaagctgcctgcaagattcaagcctggtatagatgttggagagcacacaaagaatatctagctatattaaaagctgttaaaattattcaaggttgcttctataccaaactagagagaacacggtttttgaatgtgagagcatcagcaattatcattcagagaaaatggagagctatacttcctgcaaagatagctcatgaacacttcttaatgataaaaagacatcgagctgcttgtttgatccaagcacattatagaggatataaaggaaggcaggtctttcttcggcagaaatctgctgctttgatcatacaaaaatatatacgagccagggaggctggaaagcatgaaaggataaaatatattgaatttaaaaaatctacagttatcctacaagcactggtgcgtggttggctagtacgaaaaagatttttagaacagagagccaaaattcgacttcttcacttcactgcagctgcatattatcacctgaatgctgttagaattcaaagagcctataaactttacctggctgtgaagaatgctaacaagcaggttaattcagtcatctgtattcagagatggtttcgagcaagattacaagaaaagagatttattcagaaatatcatagcatcaaaaagattgagcatgaaggtcaagaatgtctgagccagcgaaatagggctgcatcagtaatacagaaagcagtgcgccattttctcctccgtaaaaagcaggaaaaattcactagtggaatcattaaaattcaggcattatggagaggctattcttggaggaagaaaaatgattgtacaaaaattaaagctatacgactaagtcttcaagttgttaatagggagattcgagaagaaaacaaactctacaaaagaactgcacttgcacttcattaccttttgacatataagcacctttctgccattcttgaggccttaaaacacctagaggtagttactagattgtctccactttgttgtgagaacatggcccagagtggagcaatttctaaaatatttgttttgatccgaagttgtaatcgcagtattccttgtatggaagtcatcagatatgctgtgcaagtcttgcttaatgtatctaagtatgagaaaactacttcagcagtttatgatgtagaaaattgtatagatatactattggagcttttgcagatataccgagaaaagcctggtaataaagttgcagacaaaggcggaagcatttttacaaaaacttgttgtttgttggctattttactgaagacaacaaatagagcctctgatgtacgaagtaggtccaaagttgttgaccgtatttacagtctctacaaacttacagctcataaacataaaatgaatactgaaagaatactttacaagcaaaagaagaattcttctataagcattccttttatcccagaaacacctgtaaggaccagaatagtttcaagacttaagccagattgggttttgagaagagataacatggaagaaatcacaaatcccctgcaagctattcaaatggtgatggatacgcttggcattccttattagtaaatgtaaacattttcagtatgtatagtgtaaagaaatattaaagccaatcatgagtacgt

SEQ ID NO: 82 - DNA, 3142 bp, Homo sapiens
ccgcagccgccgagccgagcgcttgactatatatggtcaaagctgggggcgagccgcgcgcgggaccgcgcttccgggttcggggcgtccgcaaccacagcgcgcagggcaggcgcgagctggcctctgagccccggcctcggaccgcccactccactcccggcacgcccggtgccgccttccggctccagtccccgggctcggcctcggcgaggtgtaattcgcagcgcgggccggccccggaggctctcggcgagcgcggcgcggtaacaagtgggcgaggatgccgtacgagatcaagaaggtgttcgccagcctcccgcaggtggagaggggcgtctccaagatcatcggcggcgaccctaagggcaacaattttctgtacaccaatggaaagtgcgtcatcctaaggaacatcgacaacccagcccttgctgacatctacacagagcacgcccatcaggtggtggtggccaagtatgcgcccagcggattctacattgcctccggagatgtgtctgggaagctgaggatctgggataccacgcagaaggagcacctgttgaagtatgagtaccagcctttcgctgggaagatcaaagacattgcttggactgaagacagtaagaggatcgccgtggtcggggaaggaagggagaagtttggagcagtcttcctctgggatagtggctcttctgtgggcgagattacaggacacaacaaagtcatcaacagcgtggacatcaagcagagccggccataccggctggccacgggaagcgatgataactgcgcggcattctttgagggacccccattcaagttcaagttcacaattggcgaccacagccgctttgtcaactgtgtgcgattctctcctgatgggaacagatttgccacagccagtgctgacggccagatatacatctatgacgggaagactggggagaaggtgtgcgcgctgggcggaagcaaggcccacgacggtgggatttacgcaattagttggagtcccgacagcacccatttgctttctgcttctggggacaaaacttccaagatttgggacgtcagcgtgaactccgtggtcagcacatttcccatgggctccacggttctggaccagcagctgggctgcctatggcagaaggaccacctgctcagtgtctccctgtccgggtacatcaactatctggacagaaacaaccccagcaagcccctgcacgtcatcaagggtcacagtaaatcgatccagtgtctgacggtgcataaaaacggcggcaagtcctacatttactctgggagccacgacggacacattaattactgggattcagagacgggggagaacgactccttcgctgggaaaggccacacgaaccaggtgtccaggatgaccgtggatgagtcggggcagctcatcagctgcagcatggacgacaccgtgcggtacaccagcctcatgctgcgggactacagcggacaaggagttgtgaaactggacgttcagccaaagtgcgtagccgtcggccccgggggatacgccgtggtcgtgtgcattggacagattgtcctgctgaaggatcagaggaagtgcttcagcatcgacaaccccggctacgagcccgaagttgtggcagtgcaccccggcggggacacggtggcaattgggggtgtggacggcaacgtccgcctgtattccatcctgggcaccacgctgaaggatgagggcaagctcctagaggccaagggccccgtgaccgacgtggcctactcccacgacggcgccttcctcgcggtgtgcgacgccagcaaggtggtcacagtgttcagcgttgctgacggctactcggagaacaatgttttttatggacaccatgcaaaaatcgtctgcctggcctggtccccagacaatgaacactttgcctccggtggcatggacatgatggtgtatgtttggaccctgagtgacccggaaaccagagtcaagatccaagatgcacaccggctgcaccatgtcagcagcctggcctggctggacgagcacacgctggtcacgacctcccatgatgcctctgtcaaggagtggacaatcacctactgaggagccccacccccgcctctggatggaccgaatcagggactagagtttaactgcagcggaacatgtcatttctctatttctgtgacgcgcccccatgcccccaccccaccacaagaggcaggagggcccagtcatgaccctcgtctctgcagggtgtctgtacacgttcttctgaaagctttagacagtaacagtttgcacatgaaaaataaagcgagcacctaaacaatgtgtggagcataactaaaacccacagcccaaccaaaccttgagaatgcgaaacattccagaggcagtagcctccaaagcacacagagcccctggccccgccgcggctctcactatctgtcaggggaggttgtacaggtgaatgagccggggggctcatgttcctgcctgcagaacatttctgtactagtgagaagagggaatatgcattgcagttcagcaaagccggaattctgtgttgaacagatgtctgtctccctagtgtgtgactcacaccttgtggctgccttcagagcgccacctccagatcagatggggacacacaacccctggatatgtttcattgtcagattttgtgcttgattttaagaatggaattgtgggtatctttcctttttttttaatgtatcttaactgttgcctgtcagtgtttacaaactagtgcgttgacggcaccgtgtccaagtttttagaacccttgttagccagaccgaggtgtcctggtcaccgtttcaccatcatgctttgatgttcccctgtctttccctcttctgctctcaagagcaaaggttaatttaaggacaaagatgaagtcactgtaaactaatctgtcattgtttttaccttccttttctttttcagtgcagaaattaaaagtaagtataaagcaccgtgattgggagtgtttttgcgtgtgtcggaatcactggtaaatgttggctgagaacaatccctccccttgcacttgtgaaaacactttgagcgctttaagagattagcctgagaaataattaaatatcttttctcttc

SEQ ID NO: 83 - DNA, 2152 bp, Homo sapiens
ctgagcgacagcaagtgcagcgggctcctaccccgggtgaggggtggcctccgcgtgggatcgtgccctcttcagcccgctcctgtccccgacatcacgtgtattccgcacgtcccctccgcgctgtgtgtctactgagacggggaggcgtgacagggcccgggtcccttctcagtggtgctctgtgcttcagggcaagctccccgtctccgggcgcacttccctcgcctgtgttcggtccatcctcctttctccagcctcctcccctcgcaggtgggatcgtcggtgggaccggagcgcgggcgggcgcggccccccgggaccatggccgggtccgacaccgcgcccttcctcagccaggcggatgacccggacgacgggccagtgcctggcaccccggggttgccagggtccacggggaacccgaagtccgaggagcccgaggtcccggaccaggaggggctgcagcgcatcaccggcctgtctcccggccgttcggctctcatagtggcggtgctgtgctacatcaatctcctgaactacatggaccgcttcaccgtggctggcgtccttcccgacatcgagcagttcttcaacatcggggacagtagctctgggctcatccagaccgtgttcatctccagttacatggtgttggcacctgtgtttggctacctgggtgacaggtacaatcggaagtatctcatgtgcgggggcattgccttctggtccctggtgacactggggtcatccttcatccccggagagcatttctggctgctcctcctgacccggggcctggtgggggtcggggaggccagttattccaccatcgcgcccactctcattgccgacctctttgtggccgaccagcggagccggatgctcagcatcttctactttgccattccggtgggcagtggtctgggctacattgcaggctccaaagtgaaggatatggctggagactggcactgggctctgagggtgacaccgggtctaggagtggtggccgttctgctgctgttcctggtagtgcgggagccgccaaggggagccgtggagcgccactcagatttgccacccctgaaccccacctcgtggtgggcagatctgagggctctggcaagaaatcctagtttcgtcctgtcttccctgggcttcactgctgtggcctttgtcacgggctccctggctctgtgggctccggcattcctgctgcgttcccgcgtggtccttggggagaccccaccctgccttcccggagactcctgctcttcctctgacagtctcatctttggactcatcacctgcctgaccggagtcctgggtgtgggcctgggtgtggagatcagccgccggctccgccactccaacccccgggctgatcccctggtctgtgccactggcctcctgggctctgcacccttcctcttcctgtcccttgcctgcgcccgtggtagcatcgtggccacttatattttcatcttcattggagagaccctcctgtccatgaactgggccatcgtggccgacattctgctgtacgtggtgatccctacccgacgctccaccgccgaggccttccagatcgtgctgtcccacctgctgggtgatgctgggagcccctacctcattggcctgatctctgaccgcctgcgccggaactggcccccctccttcttgtccgagttccgggctctgcagttctcgctcatgctctgcgcgtttgttggggcactgggcggcgcagccttcctgggcaccgccatcttcattgaggccgaccgccggcgggcacagctgcacgtgcagggcctgctgcacgaagcagggtccacagacgaccggattgtggtgccccagcggggccgctccacccgcgtgcccgtggccagtgtgctcatctgagaggctgccgctcacctacctgcacatctgccacagctggccctgggcccaccccacgaagggcctgggcctaaccccttggcctggcccagcttccagagggaccctgggccgtgtgccagctcccagacactacctgggtagctcaggggaggaggtgggggtccaggagggggatccctctccacaggggcagccccaagggctcggtgctatttgtaacggaataaaatttgtagcc

SEQ ID NO: 84 - DNA, 1245 bp, Homo sapiens
atggcagcgctgcgctacgcggggctggacgacacggacagtgaggacgagctgcctccgggctgggaggagagaaccaccaaggacggctgggtttactacgccaatcacaccgaggagaagactcagtgggaacatccaaaaactggaaaaagaaaacgagtggcaggagatttgccatacggatgggaacaagaaactgatgagaacggacaagtgttttttgttgaccatataaataaaagaaccacctacttggacccaagactggcgtttactgtggatgataatccgaccaagccaaccacccggcaaagatacgacggcagcaccactgccatggaaattctccagggccgggatttcactggcaaagtggttgtggtcactggagctaattcaggaatagggttcgaaaccgccaagtcttttgccctccatggtgcacatgtgatcttggcctgcaggaacatggcaagggcgagtgaagcagtgtcacgcattttagaagaatggcataaagccaaggtagaagcaatgaccctggacctcgctctgctccgtagcgtgcagcattttgctgaagcattcaaggccaagaatgtgcctcttcatgtgcttgtgtgcaacgcagcaacttttgctctaccctggagtctcaccaaagatggcctggagaccacctttcaagtgaatcatctggggcacttctaccttgtccagctcctccaggatgttttgtgccgctcagctcctgcccgtgtcattgtggtctcctcagagtcccatcgatttacagatattaacgactccttgggaaaactggacttcagtcgcctctctccaacaaaaaacgactattgggcgatgctggcttataacaggtccaagctctgcaacatcctcttctccaacgagctgcaccgtcgcctctccccacgcggggtcacgtcgaacgcagtgcatcctggaaatatgatgtactccaacattcatcgcagctggtgggtgtacacactgctgtttaccttggcgaggcctttcaccaagtccatgcaacagggagctgccaccaccgtgtactgtgctgctgtcccagaactggagggtctgggagggatgtacttcaacaactgctgccgctgcatgccctcaccagaagctcagagcgaagagacggcccggaccctgtgggcgctcagcgagaggctgatccaagaacggcttggcagccagtccggctaa

SEQ ID NO: 85 - DNA, 2768 bp, Homo sapiens
cactgctgtgcagggcaggaaagctccatgcacatagcccagcaaagagcaacacagagctgaaaggaagactcagaggagagagataagtaaggaaagtagtgatggctctcatcccagacttggccatggaaacctggcttctcctggctgtcagcctggtgctcctctatctatatggaacccattcacatggactttttaagaagcttggaattccagggcccacacctctgccttttttgggaaatattttgtcctaccataagggcttttgtatgtttgacatggaatgtcataaaaagtatggaaaagtgtggggcttttatgatggtcaacagcctgtgctggctatcacagatcctgacatgatcaaaacagtgctagtgaaagaatgttattctgtcttcacaaaccggaggccttttggtccagtgggatttatgaaaagtgccatctctatagctgaggatgaagaatggaagagattacgatcattgctgtctccaaccttcaccagtggaaaactcaaggagatggtccctatcattgcccagtatggagatgtgttggtgagaaatctgaggcgggaagcagagacaggcaagcctgtcaccttgaaagacgtctttggggcctacagcatggatgtgatcactagcacatcatttggagtgaacatcgactctctcaacaatccacaagacccctttgtggaaaacaccaagaagcttttaagatttgattttttggatccattctttctctcaataacagtctttccattcctcatcccaattcttgaagtattaaatatctgtgtgtttccaagagaagttacaaattttttaagaaaatctgtaaaaaggatgaaagaaagtcgcctcgaagatacacaaaagcaccgagtggatttccttcagctgatgattgactctcagaattcaaaagaaactgagtcccacaaagctctgtccgatctggagctcgtggcccaatcaattatctttatttttgctggctatgaaaccacgagcagtgttctctccttcattatgtatgaactggccactcaccctgatgtccagcagaaactgcaggaggaaattgatgcagttttacccaataaggcaccacccacctatgatactgtgctacagatggagtatcttgacatggtggtgaatgaaacgctcagattattcccaattgctatgagacttgagagggtctgcaaaaaagatgttgagatcaatgggatgttcattcccaaaggggtggtggtgatgattccaagctatgctcttcaccgtgacccaaagtactggacagagcctgagaagttcctccctgaaagattcagcaagaagaacaaggacaacatagatccttacatatacacaccctttggaagtggacccagaaactgcattggcatgaggtttgctctcatgaacatgaaacttgctctaatcagagtccttcagaacttctccttcaaaccttgtaaagaaacacagatccccctgaaattaagcttaggaggacttcttcaaccagaaaaacccgttgttctaaaggttgagtcaagggatggcaccgtaagtggagcctgaattttcctaaggacttctgctttgctcttcaagaaatctgtgcctgagaacaccagagacctcaaattactttgtgaatagaactctgaaatgaagatgggcttcatccaatggactgcataaataaccggggattctgtacatgcattgagctctctcattgtctgtgtagagtgttatacttgggaatataaaggaggtgaccaaatcagtgtgaggaggtagatttggctcctctgcttctcacgggactatttccaccacccccagttagcaccattaactcctcctgagctctgataagagaatcaacatttctcaataatttcctccacaaattattaatgaaaataagaattattttgatggctctaacaatgacatttatatcacatgttttctctggagtattctataagttttatgttaaatcaataaagaccactttacaaaagtattatcagatgctttcctgcacattaaggagaaatctatagaactgaatgagaaccaacaagtaaatatttttggtcattgtaatcactgttggcgtggggcctttgtcagaactagaatttgattattaacataggtgaaagttaatccactgtgactttgcccattgtttagaaagaatattcatagtttaattatgccttttttgatcaggcacagtggctcacgcctgtaatcctagcagtttgggaggctgagccgggtggatcgcctgaggtcaggagttcaagacaagcctggcctacatggttgaaaccccatctctactaaaaatacacaaattagctaggcatggtggactcgcctgtaatctcactacacaggaggctgaggcaggagaatcacttgaacctgggaggcggatgttgaagtgagctgagattgcaccactgcactccagtctgggtgagagtgagactcagtcttaaaaaaatatgcctttttgaagcacgtacattttgtaacaaagaactgaagctcttattatattattagttttgatttaatgttttcagcccatctcctttcatatttctgggagacagaaaacatgtttccctacacctcttgcattccatcctcaacacccaactgtctcgatgcaatgaacacttaataaaaaacagtcgattggtc

SEQ ID NO: 86 - DNA, 1916 bp, Homo sapiens
gggaagcgcgccgcgcacctcatggttccggggacagttagggcggcggatggaggtcagcggtggtgctcgctgcggtttggaatcacttgctaggagtcttgtctctctgccacccaggacatcatggcagctcacctggtaaagcgatgcacgtgcctcctgagagaagctgctcgtcaggcccctgccatggctccagttggccgactgagacttgcctgggtagcccataagactctgacttcctcagccacctcacccatttcccacctcccaggttccttgatggagccggtggagaaggaacgagcatctactccctacatagagaagcaggtggaccacctcatcaagaaggccacaaggccagaggagctcctggagctacttggtggcagtcacgacttggacagcaatcaagcagcaatggtacttatccggctctctcacttgctgtctgagaagccagaagataaaggcttgctcatacaggatgcccactttcatcaacttctctgtctgctcaacagtcagattgcctcggtctggcatggtaccctctcgaagctgctgggaagcctgtatgctctgggcatccccaaggcctccaaggagctgcagtcggtggagcaggaggtccgctggcgcatgcggaagctcaagtacaagcacctggccttcctggcagagtcctgtgccaccctctcacaggagcagcactcgcaggagctgctggctgagctgctcacacacctggaaaggcgttggacagaaattgaagattcccacacattagtgaccgtcatgatgaaggtgggacacctctcggagccactaatgaaccgcctggaagacaagcacgtcctgaacagagcgcaggacatcaccctgccccacctgtgcagcgtacttctggcttttgcgcgtctgaacttccatccagaccaagaggatcagttcttcagcctggtacatgagaagctggggtcagagctgccaggcctggagccagccctgcaggtggacctggtgtgggccctgtgtgtgctgcagcaggcacgggaagcagagctgcaagccgtcctccaccctgaatttcacatccaatttctagggggcaagtctcagaaggatcagaacaccttccagaagctgctccacatcaacgccactgccctgctggagtaccccgagtactcgggtccccttctgcctgcctcggctgtggcccctgggccctcagcccttgacaggaaggtgacccccctgcaaaaggagctgcaggagacgctgaaggggctgctggggagcgccgacaagggcagcctcgaggtggccacgcagtatggctgggtgctggatgctgaggtgctgctggacagtgacggcgagtttctgcccgtaagggactttgtggcacctcaccttgcccagccaactgggagccagtcaccacctccagggtctaagaggctagcgttcttgcggtgggagttccccaacttcaacagccgaagcaaggacttgctgggtcgctttgttctggcccggcgacacatagtggctgcaggcttcctgatagtggacgtcccattctatgagtggctggaactcaagtctgaatggcagaaaggcgcctacctcaaggacaagatgcgcaaagcggtggctgaggagctggccaagtgacttgtgccagcagcatggactgcgtgcctctccgccggaggtctagctgtgggcggccaagaagggtcacccttgaggacaaacctctgtgcaggaccttggccagagtggggagggtggccagccactctgagggacagaacgtcctcttgtgtataataaacctttaattttggtgttggacccctggggccttcccaggcttggtcaccctctgcactgtc

SEQ ID NO: 87 - DNA, 1139 bp, Homo sapiens
ccacgttgtcttctttccttcaccaccacccaggagctcagagatctaagctgctttccatcttttctcccagccccaggacactgactctgtacaggatggggccgtcctcttgcctccttctcatcctaatcccccttctccagctgatcaacccggggagtactcagtgttccttagactccgttatggataagaagatcaaggatgttctcaacagtctagagtacagtccctctcctataagcaagaagctctcgtgtgctagtgtcaaaagccaaggcagaccgtcctcctgccctgctgggatggctgtcactggctgtgcttgtggctatggctgtggttcgtgggatgttcagctggaaaccacctgccactgccagtgcagtgtggtggactggaccactgcccgctgctgccacctgacctgacagggaggaggctgagaactcagttttgtgaccatgacagtaatgaaaccagggtcccaaccaagaaatctaactcaaacgtcccacttcatttgttccattcctgattcttgggtaataaagacaaactttgtacctctctgtgcttatgtcatctctgttattgtccccagcttggggctcccctatccagaaaatgttgtcagtgtcccagtggtgacatctcagtttgggaagtgggatgggaagttaggaaagatatgggaagaatgggaaaaacaaactgacactccaaacccccacttccctcatttttatttatttatttatttatttttttcttttttttcattttttttttttttattatactctaagttttagggtacatgtgcacattgtgcaggttagttacatatgtatacatgtgccatgctggtgcgctgcacccactaacgtgtcatctagcattaggtatatctcccaatgctatccctcccccatcccccgaccccaccacagtccccagagtgtgatattccccttcctgtgtccacgtgatctcattgttcaattcccacctatgagtgagaatatgcggtgtttggttttttgttcttgcgatagtttactgagaatgatggtttccaatttcatccatgtccctacaaaggacatgaactcatcattttttatggctgcata

SEQ ID NO: 88 - DNA, 3105 bp, Homo sapiens
gcggagcgtggcctcgatcaccaccgagagctgacggccgcccggattcccgccctcagagaatcctggcccccagtcgttccaagaccctttacggactgcagcttaaaggaaccggcctctgccattgagaccaaactgacagaggaactggtcactcttctgttctttccagagaggagcttagccagggacttctgcccttcctgggcccgggcctcgggggcgattccgggtaggtaaagcggaacgagggcgtggcctctcttgtgagcccgccctccccgtgtcgctcccgccttgagggcggggctctttcccaagtgccctctgtgagagccgggccgctctctccggggcgtggcgaagaggggcggagtcacgagcggggcggtgagacttcctgcccagtcgcgggccagcctagcgcttcagccggcggctcatttccggtgggggcgccgcgcccagtgagggcccggaagtgggtcgcgcggagattgctgggcggttcttgccggaagcggagagcggctgatcgcagtccggaggtggtccattatggctgacatgcaaaatctggtagaaagattggagagggcagtgggccgcctggaggcagtatctcatacctctgacatgcaccgtgggtatgcagacagtccttcaaaagcaggagcagctccatatgtgcaggcatttgactcgctgcttgctggtcctgtggcagagtacttgaagatcagtaaagagattgggggagacgtgcagaaacatgcggagatggtccacacaggtttgaagttggagcgagctctgttggttacagcttctcagtgtcaacagccagcagaaaataagctttccgatttgttggcacccatctcagagcagatcaaagaagtgataacctttcgggagaagaaccgaggcagcaagttgtttaatcacctgtcagctgtcagcgaaagtatccaggccctgggctgggtggctatggctcccaagcctggcccttatgtgaaagaaatgaatgatgccgccatgttttatacaaaccgagtcctcaaagagtacaaagatgtggataagaagcatgtagactgggtcaaagcttatttaagtatatggacagagctgcaggcttacattaaggagttccataccaccggactggcctggagcaaaacggggcctgtggcaaaagaactgagcggactgccatctggaccctctgccggatcatgtcctcctccccctccaccatgcccccctcctcccccagtctctaccatttcatgctcatatgagtctgcttcccgctcatcactgttcgcgcagattaatcagggggagagcattacacatgccctgaaacatgtatctgatgacatgaagactcacaagaaccctgccctgaaggctcagagtggtccagtacgcagtggccccaaaccattctctgcacctaaaccccaaaccagcccatcccccaaacgagccacaaagaaggagccagctgtacttgaactggagggcaagaagtggagagtggaaaatcaggaaaatgtttccaacctggtgattgaggacacagagctgaaacaggtggcttacatatacaagtgtgtcaacacgacattgcaaatcaagggcaaaattaactccattacagtagataactgtaagaaacttggcctggtattcgatgacgtggtgggcattgtggagataatcaacagtaaggatgtcaaagttcaggtaatgggtaaagtgccaaccatatccatcaacaaaacagatggctgccatgcttacctgagcaagaattccctggattgtgaaatagtcagtgccaaatcttccgagatgaatgtcctcattcctacagaaggcggtgactttaatgaattcccagttcctgagcagttcaagaccctatggaacgggcagaagttggtcaccacagtgacagaaattgctggataagcgaagtgccactgggttctttgccctcccttcacaccatgggataaatctgtatcaagacggttcttttctagatttcctctacctttttgctcttaaaactgcttctctgctctgagaagcacagctacctgccttcactgaaatatacctcaggctgaaatttggggtgggatagcaggtcagttgatcttctgcaggaaggtgcagcttttccatatcagctcaaccacgccgccagtccattcttaaggaactgccgactaggactgatgatgcattttagctttgagcttttgggggttattctaccaacaaacagtccattggaaagaaaacagtccctggaattaacagatcagaatgttcacactggttaatctttttttaacaatgagcatgaaggtagcagaagctggtgtgtttccagatggttcttctaaccaaactaatttttcactgttgacaagcgaggcaagggttgcactggaccaaaggctgaggcttggccatctagcattccatacaaaattgtttcctataagcattccttttattctctattctatcctgggtctgcctcaaccgtgagataggagagtctctggtactagctgctgtagcagtgcccttcatccagggcagttaatggagtcttggaccctttctttctctgggatccctgcccagcaccttcctatagagatgactttaaaaggaaaaaaaaaaaaaaaaaaacccacatgatttcaaggagtctggcattcctgaatccttcttccctgccaggtgcctgtcacctgtcttcactgcctccttttccctgtcatgctcatcagcttatggcttctgtctaagcacctgaacagaggactgaaacctccactgcaggctggttttaggtcttgaattatgtaagaatcttgcacagcactgctaatgtaaatttcagttgtttttccctctaggacaaacacttaccaaaatatgcaacttttttttggtgggaagagagattgtcctgtgatttctacccatttcctgaggcctgtggaaataaacctttatgtacttaaagttatacagaaaatagaataaagttaataccaaacttgc

SEQ ID NO: 89 - DNA, 5354 bp, Homo sapiens
cagccggcggcgggctgggtgtttgcaatacaaaggcggccacgcgcggcgccgctcggtgcagaccatgaattacgtggggcagttagccggccaggtgtttgtcaccgtgaaggagctctacaaggggctgaatcccgccacactctcagggtgcattgacatcattgtcatccgccagcccaatggaaacctccaatgctcccctttccacgtccgctttgggaagatgggggtcctgcgctcccgagagaaagtggttgacatagaaatcaatggggaatctgtggatttgcatatgaaattgggagataatggagaagcattttttgttcaagaaacagataatgatcaggaagttatccctatgcacctggccacctcccccatcctgtcagaaggagcttcgagaatggaatgccagctgaaaaggggctctgtggacaggatgagaggcctggaccccagcacgccagcccaagtgatcgctcccagcgagacgccgtcaagcagctctgtagtaaagaagagaagaaaaaggaggagaaagtcacagctggacagcctgaagagagatgacaacatgaacacatctgaggatgaggacatgttccccatcgagatgagctcggatgaggccatggagctgctggagagcagcagaactcttcctaatgatatacctccattccaagatgatattcctgaggaaaacctctccctggctgtgatttaccctcagtcagcctcataccctaattcggatagagagtggtcacccactcccagtccttccggttcccgaccttcaacacctaaaagtgattcagaattggtcagcaagtccacggaaaggacagggcagaagaacccagaaatgctttggctgtggggagagctgccgcaggctgctaagtcttcttctccacacaagatgaaagagtccagcccattgagcagtagaaaaatttgtgataaaagtcactttcaggccattcacagcgaatcttcagacacttttagtgaccaatcgccaactctggtcggtggggcacttttggaccagaacaagcctcagacagaaatgcagtttgtgaatgaagaagacctggagaccttaggagcagcagcgccactcttgcccatgatcgaggagctcaaacccccctctgccagtgtagtccagacagcaaacaagacggattctccttccaggaaaagagataaacgaagccgacatcttggtgctgacggcgtctacttggatgacctcacagacatggatcctgaagtggcggccctgtattttcccaaaaacggagatccttccggactcgcaaaacatgcaagcgacaacggagcccggtcagccaaccagtccccgcagtcggtgggcagctcgggcgtggacagtggcgtggagagcacctcggacgggctgagggacctcccttccatcgccatctccctctgcgggggcctcagcgaccaccgggagatcacgaaagatgcattcctggagcaagctgtgtcatatcaacagtttgtggacaaccccgctattatcgatgaccccaatctcgtggtaaagattgggagtaaatattataactggacaacagcagcacccctcctcctggcaatgcaggccttccagaaacctttgccaaaggccactgtggaatctatcatgagggataaaatgcccaaaaagggaggaagatggtggttttcatggaggggaagaaacaccacaatcaaggaggaaagtaagccagagcagtgcttggctggcaaggcccatagcaccggagagcaaccgccgcagctcagcttggccaccagggtaaagcatgaatcatcctccagtgatgaggagcgcgcagctgccaagccatcaaacgcaggccacctccctcttctgcctaatgtcagctacaagaagactctccggctgacttccgagcagcttaaaagcttgaagttgaagaatggccccaacgacgtggttttcagtgtcaccacgcagtaccaaggcacgtgccgctgtgagggcaccatctatctgtggaactgggatgataaagtcatcatttctgatattgatgggacaattaccagatcagatactcttggccacattttgcccacccttgggaaggattggacccatcagggcatcgctaagctgtaccataaagtgagccagaatggatataaatttctctactgttctgcccgtgccatcgggatggcggacatgacgcggggctacctgcactgggtcaacgagaggggcacggtgctgccccaggggcccctgctgctgagtcccagcagcctcttctctgccctgcacagagaagtgattgaaaagaagccagaaaagtttaaagtccagtgtttgacagacatcaaaaacctgtttttccccaacacagaacccttttatgctgcttttggaaaccgaccagctgatgtgtattcatacaagcaagtaggagtgtctttgaatagaatatttaccgtcaaccctaaaggagagctggtacaggaacatgcaaagaccaacatctcttcgtatgtgagactctgtgaagtagtcgaccacgttttcccgttgctgaaaagaagccattcttcagactttccctgttcggataccttcagtaacttcaccttttggagagagccactgccaccttttgaaaaccaggacattcattctgcctcagcgtaaaatgtcccaagcagcctcttgccagcagtgcagagcctggttgtcacccattaaaggataggtctccccggagtgcacagctccacctgggagcctggcgcgtcatcattggcctgacagcagagagaattgagaagcatttctcccctgccccaccccggggctgacatttctaagcaagataggaagggagcactttctaggctaggagttgggtgcatttgtaccgtgaaaagcattcctcagttgtggcttaatgccagttacgacgctgcctttccggcctgctccagcaagtagctactggttcacgtgcagtttggggctgtgaaacctaggcagaaggcggctgtctgagggctgtccccgcctaggacagggtcaatcgaggaatgccagatgtgcacggtttttggcaaagtagggggcacatttccattatagcaatgttagtgccaccaccttctgaacacagtggggagggctgtgaaggctcatgtgacctggatctgaggtctctgatagaaatctggacgccaccgggtccaggcctggcctcagacttggccttgtggatgggccccttacagtatttgctgactagtctcatttttaggtgataaatttttctttaattcctttggttaaagatagtctatttcattggcatatctccccccagtttttgtggctcaaggctggaatatttatgccttaatatatctatggcagacatttaagaatgcgctttatctagctcatggtaactttgcaacgccttagattaaaatgacagtaaatattactaaggcagtattttgaatgagtttgacactgccggcttccttccatccagcgaggtggtgctgacagtgtggacttgagcacacttatgccaaatgataatgatactgacttctgttgggagctctccaaagaaactggttggttttaagaaaatagtttcaagaagttcaactatattcttttagatattatgtattgttttactctgattaggttactgtgataggcatttattcatattctttctataccactgtcattaatatattaaaaagatgtatgtgttagactatcgaaagggccttattctctctttctcatagactgaccttcttttggaatttctgagtcatttattttccttagctttttccactcaaattaagggcaagcgaaaaagtaataatttggcattctttaagcctacagaatgtgattctttcacttgtttattacactggctcgtggacagaacaatttgaaaagtgaaagaattattttggtaaaagattttgctttacttttcgaagcattatttttttaaagagtgttttactccaacgattgaaacattttcctatttaaatttcattgttagaatcacaggaggcaaaaaatggaacggttgaatgaaattttactctttctgtgaaagaaaatccacagagttgttgcctccgttgtagttggtgggccccgttagcattggatgcctttgccaaatggttcatgtggacacacaaaggcaaacagatctgccatcgatcgcagatttctgtagaaacacggatgtgcatgtgcagattcccttttgcaggtattaaaaataattaaaaatagtcctgcctgaggttgcagtgagccgagcttgcactactgcactccagcctgggtgacagagtaagactccatgtcaaaaaaaaaaaaaaaaaaaaaaaagtcctgccttaactaactcctctgcgcttgttcactagtaacctaaagaggctatattcattctttatgcaatgagggtatttttgagtgaattttaactgctctgaactaagtataagctcatgggcctgcaaaggttcagacggtttctcctttgcacccaggaggaactttggctgcgagaatggggggatgtatccctcatgcagttggcatccaggcagccctctgcagcagcacaccctgcaggcggagttttcagaggatgcaattttggatcccgaattttgatgtaccttaaacttccacatcactgcaccctgaaacagagcatgctttccagaaagtcacactctcagatctgtgtcaagttcaatgtgagccctggcaaggctggcatattaacacctgccttctggcttctgaaagtgagatttgtatatgggctgcactcacgcatatacgagttggtttatctttgtgtacatgactataacccagtgatgctgaggtcatgtgctggaatgctgtatttggaccacacatttcaaagttgccctatggaaatgaatcctacttagtgacaagtcatcaaatgtttgtcacatgtgatgaagacaaatatgtatacctggcatagagaaaaatatatacctggtacattggagaaaaataattacactttcaaagagaattccctttgcaattttatgtttggatcaccactgtaagcacactttatttgcatttgatctgtatttgtatatgctgatgcaatgataaaaatcactgtaatacttcattgtgttgtactggatgcaaagctagaaaatattgcaataaatgagaccgatgaaagacttctctg

SEQ ID NO: 90 - DNA, 3314 bp, Homo sapiens
cggaggagtcttaccctaatgtaagatggtggcccgtctggctgtggaacccaccgaaagctgagagtctctctctcagccgtaaaggtcggactcgctgaagcaatcaggcccggttctgaagagttttttccccgacgctcgttcggtggtttcttgtgaggacgcggcagcccgtggagtcggctgagggaaaagcgaggcaaggcaggcgggtcgtcaaagtcctacattttagctttcagtgctgaacttccttctcccttaaattattataaacttttgctgctgtttaataaacgtgaagatgtctcgcagtcctgatgcgaaggaagaccctgtggagtgccctctttgcatggagcccttggagatagatgatatcaactttttcccttgcacctgtggctaccagatttgccgattttgttggcatcgaattcgcactgatgaaaatgggctttgtcctgcatgtagaaagccatatccagaagacccagcagtttataaaccactctcccaggaagagctgcaaaggataaagaatgagaaaaaacagaaacaaaatgagagaaaacagaaaatatcagaaaatcgcaaacatttggctagtgtacgtgtcgtacaaaaaaacctcgtctttgttgtaggtttatctcagcgcctagcagacccagaggttttaaaacgaccagaatattttgggaagtttggtaaaatacataaagttgtcatcaataatagcacatcatatgcaggctcacagggtccaagtgccagtgcttatgtaacctatatccggtcagaagacgctctcagagccatacagtgtgtcaacaatgtggtagtagatggcagaacacttaaggcatctctaggtacaacaaaatactgcagttacttcttaaagaatatgcagtgtccaaaacctgactgcatgtatcttcatgaattgggggatgaggcggccagcttcacaaaagaggaaatgcaggcgggtaaacaccaagaatatgaacagaagctacttcaagaattatataaattaaatcccaattttcttcagctatctacgggttcagttgataaaaataagaacaaagtgacaccactgcagagccccattgacaaaccttcagattctctcagtatagggaacggtgataattcccagcagatatctaacagtgatacgccttcaccaccacctggtttgtcaaaatccaatccagtcatccccatcagttcatccaatcacagtgcacggtccccttttgaaggggcagtaacagagtcacagtcgttattctcagacaattttcgccatcccaaccctatcccaagtgggcttcctcctttccccagctccccacagacatccagtgactggcctacagcaccagaaccacagagcctcttcacatcagaaacaatcccagtatcatcctctacagactggcaagcagcttttggctttggttcttctaaacaaccagaggatgacttgggttttgatcccttcgatgtcactcgaaaagccttagcagacctgattgagaaggaactgtccgttcaagaccaaccttccctttcgcccacatctcttcagaactcctcttcacacactacaaccgccaaaggtccaggctctggattcctgcatcctgctgcagctacaaatgccaattctctcaatagtaccttttcagtcttgccccagaggttccctcaatttcagcagcaccgagcggtttataattcattcagttttccaggccaggcagcccgctatccttggatggcctttccacgcaatagcatcatgcacttgaaccacacagcaaaccccacctcaaatagtaatttcttggacttgaatctcccgccacagcacaacacaggtctgggagggatccctgtagcaggtattccagcgtcttcaggaaacagtttagactctcttcaagatgacaatcctccacactggctaaaatcccttcaggccctcacagagatggacggccccagcgctgctccatcacagacccaccacagcgcccccttcagcacacagatcccgctgcacagagccagttggaatccctaccctcctccttcaaacccttccagcttccactccccacccccaggctttcagacagccttcagaccccccagcaaaacccccacagatttactacagagttcaacactggaccgccattaggcaaagaggagcaaccattagaaaatgcaggatttgtcccactctgttttctccctctcagcccaccacccacagctcccttctcatctcttatgttctgaagaatccagtacctgatcaattttttttctccctaaccccagatgcaatgcgatcacagggtcattaccatctctttattaattgtaaaaatttttgttgatccagcatttgagtgacactgttgaatgtttctaaaaatgcctttttaaggagagaaaaaaaaatcaaagggcagtctcaatacttagaaaattattgtttgtctgttgcgcataataatgacataatctgcttagcagaaaatgacgattaatctataggaaagctcaagtaaatgcattatcaactgcagaagtttgaaaaccaggttcatttacgtgagattgctaaatgcatgggggaaagcagtggtcctagcatccatcttgtattcagcttatcattattgcagggaaaatgcttttaatttaaattaatttttaattcttttggcaagttgatggcaaggacttgattgtgtcattaagcaaaagaatgtattggaagttgatggaaagacaaattcatctgtagtagtaactggccgattgctaaagagttcataaggaggtgagaagtaatttttttaaaggagaaaaattttttggctttagatttaaagtaaattgaaatgttttaaagaaaaaagtattcacagatttaatacctattaataatataagagctgaaatgtaagtcatttcttcagtccttctcctctgtcggaatcttttttgttttaccataaattcacctgacgagggcactctgagatagcactgctctggggccatctgatcaccatcgggagcaaatctctgacctccttgcctgcagcttttacttaaccctgtagtttctggacgtttgtgcagtattgaaaagacaggagaaaagaaaacagaaacctggttataacctgacgctaaaactaaaaacaaggaaatgtacctctttcttcagaattaaaactaaaatcttaaataaaacagaaaacttgatggtg

SEQ ID NO: 91 - DNA, 1242 bp, Homo sapiens
cggacgcgtgggccggggagcaggagaagccatggctgatgagaaaccatccaacggtgttctggtccacatggtgaagttgctgatcaagacctttctagatggcatttttgatgatttgatggaaaataatgtgttaaatacagatgagatacaccttataggaaaatgtctaaagtttgtggtgagcaatgctgaaaacctggttgatgatatcactgagacagctcaaattgcaggcaaaatatttagggaacacctgtggaattccaaaaaacagctgagttcagatatatccagtgatggagaaagagaggcgaacatgcctggcctcaacatccgcaacaaagaattcaactatcttcataatcgaaatggttctgaacttgaccttttggggatgcgagatctacttgaaaaccttggatactcagtggttataaaagagaatctcacagctcaggaaatggaaacagcactaaggcagtttgctgctcacccagagcaccagtcctcagacagcacattcctggtgtttatgtcacatagcatcctgaatggaatctgtgggaccaagcactgggatcaagagccagatgttcttcacgatgacaccatctttgaaattttcaacaaccgtaactgccagagtctgaaagacaaacccaaggtcatcatcatgcaagcctgccgaggcaatggtgctgggattgtttggttcaccactgacagtggaaaagccagtgcagatactcatggtcggctcttgcaaggtaacatctgtaatgatgctgttacaaaggctcatgtggaaaaggacttcattgctttcaaatcttccacaccacataatgtttcttggagacatgaaacaaatggctctgtcttcatttcccaaattatctactacttcagagagtattcttggagtcatcatctagaggaaatttttcaaaaggttcaacattcatttgagaccccaaatatactgacccagctgcccaccattgaaagactatccatgacacgatatttctatctctttcctgggaattaaaactcataagaagcaactcaggaaaatgaaggcattatggtgtctatgaatctgctattagaaaaggtcaatttttgattaagaatatttttataccaaactgctcagctgtccaccttttcaaataccaggctaaaatcaatctcatatttttgctaaattaatgcttaataaatttttattat

SEQ ID NO: 92 - DNA, 1799 bp, Homo sapiens
cacccggcgctccaagttcggggctggaggcgtcccggcttcctccctcccggagcgggaccggccccgcccccgcgccccgggtcgctcccggcggcccctcccacctcctagtcctggcctccccgggcgcagcacactcccagccggccgcagcctgacacgccgcgcggccccccagtctcccgcggctgctcccccaggcatggcacagggcctcgcctcactatggcagcagcacggcacagcacgctcgacttcatgctcggcgccaaagctgatggtgagaccattctaaaaggcctccagtccattttccaggagcaggggatggcggagtcggtgcacacctggcaggaccatggctatttagcaacctacacaaacaagaacggcagctttgccaatttgagaatttacccacatggattggtgttgctggaccttcagagttatgatggtgatgcgcaaggcaaagaagagatcgacagtattttgaacaaagtagaggaaagaatgaaagaattgagtcaggacagtactgggcgggtgaaacgattaccacccatagtgcgaggaggagccatcgacagatactggcccaccgccgacgggcgcctggttgaatatgacatagatgaagtggtatatgacgaagattcaccttatcaaaatataaaaattctacactcgaagcagtttggaaatattctcatccttagtggggatgttaatttggcagagagtgatttggcatatacccgggccatcatgggcagtggcaaagaagattacactggcaaagatgtactcattctgggaggtggagacggaggcatattgtgtgaaatagtcaaactaaaaccaaagatggtcactatggtagagattgaccaaatggtgattgatgggtgtaagaaatacatgcgaaaaacgtgtggcgatgtcttagacaatcttaaaggagactgctatcaggttctaatagaagactgtatcccggtactgaagaggtacgccaaagaagggagagaatttgattatgtgattaatgatttgacagctgttccaatctccacgtctccagaagaagattccacatgggagtttctcagactgattcttgacctctcaatgaaagtgttgaaacaggatgggaaatattttacacaggggaactgtgtcaatctgacagaagcactgtcgctctatgaagaacagctggggcgcctgtattgtcctgtggaattttcaaaggagatcgtctgtgtcccttcatacttggaattgtgggtattttacactgtttggaagaaagctaaaccctgaagatcagtagcccctaatcacatgtgctgcaaatagccttcctgacctccatatgctgtacatgacatcaaaatgagtcaggcaattgattgtgaattccttaaagttttcctttttttaataattatttttaatttaaaaaagcaaatggaaaatgtatattttgatgagcttagggtgttttttttttgaaagtcagctgaaggatggttagacagcacagcgaagactgctaaatgcactgaccccccccattagaatgtgatttttgttcctttttatttctctgtgggcttttgtttttgtttttgttttggtagatcttcaatttggatatttggaggagtgaacatcgttgttttgctggagggaagatcttgatggtgtttctttccccaaaaattgacttagatattaaaatttggtgcttataagagagagttaaaaaaaaataggattgcttcaattaa

SEQ ID NO: 93 - protein, 829 aa, Homo sapiens
MAKYNTGGNPTEDVSVNSRPFRVTGPNSSSGIQARKNLFNNQGNASPPAGPSNVPKFGSPKPPVAVKPSSEEKPDKEPKPPFLKPTGAGQRFGTPASLTTRDPEAKVGFLKPVGPKPINLPKEDSKPTFPWPPGNKPSLHSVNQDHDLKPLGPKSGPTPPTSENEQKQAFPKLTGVKGKFMSASQDLEPKPLFPKPAFGQKPPLSTENSHEDESPMKNVSSSKGSPAPLGVRSKSGPLKPAREDSENKDHAGEISSLPFPGVVLKPAASRGGPGLSKNGEEKKEDRKIDAAKNTFQSKINQEELASGTPPARFPKAPSKLTVGGPWGQSQEKEKGDKNSATPKQKPLPPLFTLGPPPPKPNRPPNVDLTKFHKTSSGNSTSKGQTSYSTTSLPPPPPSHPASQPPLPASHPSQPPVPSLPPRNIKPPFDLKSPVNEDNQDGVTHSDVVIPLDHEQDSEGETYEDIEASKEREKKREKEEKKRLELEKKEQKEKEKKEQEIKKKFKLTGPIQVIHLAKACCDVKGGKNELSFKQGEQIEIIRITDNPEGKWLGRTARGSYGYIKTTAVEIDYDSLKLKKDSLGAPSRPIEDDQEVYDDVAEQDDISSHSQSGSGGIFPPPPDDDIYDGIEEEDADDGSTLQVQEKSNTWSWGILKMLKGKDDRKKSIREKPKVSDSDNNEGSSFPAPPKQLDMGDEVYDDVDTSDFPVSSAEMSQGTNVGKAKTEEKDLKKLKKQEKEEKDFRKKFKYDGEIRVLYSTKVTTSITSKKWGTRDLQVKPGESLEVIQTTDDTKVLCRNEEGKYGYVLRSYLADNDGEIYDDIADGCIYDND

SEQ ID NO: 94 - protein, 1182 aa, Homo sapiens
MESLLENPVRAVLYLKELTAIVQNQQSLIHTQRERIDELERRLDELSAENRSLWEHQQLLQAQPPPGLVPPSSAPLPAAPATAPAAAARAQEPLQDQGQRSAAAPHPAPDRPPRQHHGQLLEQPQRGPGSRAHTPQSPHKHLGTQGAVTDKEKERPPSCCAAAGALLQHKSPSALGKGVLSRRPENETVLHQFCCPAADACSDLASQSDGSCTQAGGGMEDSVVAAAAVAAGRPSAHAPKAQAQELQEEEERPGAGAASPRAGPQHKASPGRQQPALATALCPHAPAASDYELSLDLKNKQIEMLEHKYGGHLVSRRAACTIQTAFRQYQLSKNFEKIRNSLLESRLPRRISLRKVRSPTAESLAAEKALMEGYGLVGLPLVRSPSLPPTFAGTLTELEDSFTEQVQSLAKSIDDALSTWSLKTMCSLRESGAYQLHQALQAAAGPPGLEAEGRAPESAGPGPGDDAAETPGLPPAHSGTLMMAFRDVTVQIANQNISVSSSTALSVANCLGAQTVQAPAEPAAGKAEQGETSGREAPEAPAVGREDASAEDSCAEAAASGAADGATAPKTEEEEEEEETAEVGRGAEAEAGDLEQLSSSSTSTKSAKSGSEASASASKDALQAMILSLPRYHCENPASCKSPTLSTDTLRKRLYRIGLNLFNINPDKGIQFLISRGFIPDTPIGVAHFLLQRKGLSRQMIGEFLGNSKKQFNRDVLDCVVDEMDFSSMELDEALRKFQAHIRVQGEAQKVERLIEAFSQRYCMCNPEVVQQFHNPDTIFILAFAIILLNTDMYSPNIKPDRKMMLEDFIRNLRGVDDGADIPRELVVGIYERIQQKELKSNEDHVTYVTKVEKSIVGMKTVLSVPHRRLVCCSRLFEVTDVNKLQKQAAHQREVFLFNDLLVILKLCPKKKSSSTYTFCKSVGLLGMQFQLFENEYYSHGITLVTPLSGSEKKQVLHFCALGSDEMQKFVEDLKESIAEVTELEQIRIEWELEKQQGTKTLSFKPCGAQGDPQSKQGSPTAKREAALRERPAESTVEVSIHNRLQTSQHNSGLGAERGAPVPPPDLQPSPPRQQTPPLPPPPPTPPGTLVQCQQIVKVIVLDKPCLARMEPLLSQALSCYTSSSSDSCGSTPLGGPGSPVKVTHQPPLPPPPPPYNHPHQFCPPGSLLHGHRYSSGSRSLV

SEQ ID NO: 95 - protein, 139 aa, Homo sapiens
MEAVVFVFSLLDCCALIFLSVYFIITLSDLECDYINARSCCSKLNKWVIPELIGHTIVTVLLLMSLHWFIFLLNLPVATWNIYRYIMVPSGNMGVFDPTEIHNRGQLKSHMKEAMIKLGFHLLCFFMYLYSMILALIND

SEQ ID NO: 96 - protein, 243 aa, Homo sapiens
MQFRLFSFALIILNCMDYSHCQGNRWRRSKRASYVSNPICKGCLSCSKDNGCSRCQQKLFFFLRREGMRQYGECLHSCPSGYYGHRAPDMNRCARCRIENCDSCFSKDFCTKCKVGFYLHRGRCFDECPDGFAPLEETMECVEGCEVGHWSEWGTCSRNNRTCGFKWGLETRTRQIVKKPVKDTILCPTIAESRRCKMTMRHCPGGKRTPKAKEKRNKKKKRKLIERAQEQHSVFLATDRANQ

SEQ ID NO: 97 - protein, 967 aa, Homo sapiens
MGPGQPASTCVHLAPRTQLDGRSDPKVLQTQNQLQFNRNVPTHSSNLAIRYSCPHAIRIEKLKHSYNESYHCKDADCRVGPDLGSSVSFSVISQERLSYAVHLARRDVKRRQFEKHIKEHHLRSQPQSSQKCGHTKYKIPDHRVERKESKSQAACQCSHQPSKVEISSSGAKVYLYSSHPGQSDLTVPNSPPTHDPGLQPHPRIGDHKNISEQKSLLEVQRLQKELSSCIHKIEEVTKKDRLEEALDPDEERRIRIRRQEQAARSARMLYVLQQQVKEIQEELDKLSPHKIKHTKKSWAMSKLAAAHRGAIRALQMFVTQFTDRGEHPLPARCKELGSLIRQLSLCSVKLDADPSVPDVVIDILQQIEALESLLEKKLSPKKVKKCFSEIRSRFPIGSQKALERWPSTSPKGERRPLTAKDTFPQETSRPSVAKQLLADKYQPDTELPETQRLQSELDVLDADIVLEEGPFILDQSASFKDEVLAVAKTKAGKKKPVTENVPFRKKDTLAPARQQGLRKAERGRQSQPHSKSRVQQTTVSSRLKMNRQPVKDRKAPWIPPNPTSPPASPKCAAWLKVKTSPRDATKEPLQQEDPQEESHLTGAVEHEAARLAWLDAETSKRLKELEELKAKEIDSMQKQRLDWLDAETSRRTKELNELKAEEMYRLQQLSVSATHLADKVEEAVLDRLKPLLVKAQRVNSTTEANIHLKDGSSVNTAKAQPAQEVAAVDFESNNIRQLDDFLEDCASELWAVTHAKILGSETLATVEDSKDSPDLEIMMRRMEEMEKYQESVRQRYNKIAYADPRLWMQEENNDQKISAISEKPLSPHPIRITKTVDRKDPAVNIMLERPCNGNSLDESVGTEEGSEKREAPLLSLAEDSQQKEGRAPLFVPPGMQHSIGDYCSRFEQYLRIISHEAVGSFNPWLIAESFSEELVDEALGAVAAELQDMCEDYAEAVFTSEFLEAAT

SEQ ID NO: 98 - protein, 690 aa, Homo sapiens [sequence omitted]

SEQ ID NO: 99 - protein, 303 aa, Homo sapiens
MSSAPASGSVRARYLVYFQYVGTDFNGVAAVRGTQRAVGVQNYLEEAAERLNSVEPVRFTISSRTDAGVHALSNAAHLDVQRRSGRPPFPPEVLAEALNTHLRHPAIRVLRAFRVPSDFHARHAATSRTYLYRLATGCHRRDELPVFERNLCWTLPADCLDMVAMQEAAQHLLGTHDFSAFQSAGSPVPSPVRTLRRVSVSPGQASPLVTPEESRKLRFWNLEFESQSFLYRQVRRMTAVLVAVGLGALAPAQVKTILESQDPLGKHQTRVAPAHGLFLKSVLYGNLGAASCTLQGPQFGSHG

SEQ ID NO: 100 - protein, 351 aa, Homo sapiens
MEPAPGLVEQPKCLEAGSPEPEPAPWQALPVLSEKQSGDVELVLAYAAPVLDKRQTSRLLKEVSALHPLPAQPHLKRVRPSRDAGSPHALEMLLCLAGPASGPRSLAELLPRPAVDPRGLGQPFLVPVPARPPLTRGQFEEARAHWPTSFHEDKQVTSALAGRLFSTQERAAMQSHMERAVWAARRAAARGLRAVGAVVVDPASDRVLATGHDCSCADNPLLHAVMVCVDLVARGQGRGTYDFRPFPACSFAPAAAPQAVRAGAVRKLDADEDGLPYLCTGYDLYVTREPCAMCAMALVHARILRVFYGAPSPDGALGTRFRIHARPDLNHRFQVFRGVLEEQCRWLDPDT

SEQ ID NO: 101 - protein, 422 aa, Homo sapiens
MSFVECPYHSPAERLVAEADEGGPSAITGMGLCFRCLLFSFSGRSGVEGGRVDLNVFGSLGLQPWIGSSRCWGGPCSSALRCGWFSSWPPPSKSAIPIGGGSRGAGRVSRWPPPHWLEAWRVSPLPLSPLSPATFGRGFIAVAVIPGLWARGRGCSSDRLPRPAGPARRQFQAASLLTRGWGRAWPWKQILKELDECYERFSRETDGAQKRRMLHCVQRALIRSQELGDEKIQIVSQMVELVENRTRQVDSHVELFEAQQELGDTAGNSGKAGADRPKGEAAAQADKPNSKRSRRQRNNENRENASSNHDHDDGASGTPKEKKAKTSKKKKRSKAKAEREASPADLPIDPNEPTYCLCNQVSYGEMIGCDNDECPIEWFHFSCVGLNHKPKGKWYCPKCRGENEKTMDKALEKSKKERAYNR

SEQ ID NO: 102 - protein, 271 aa, Homo sapiens
MAAEEPQQQKQEPLGSDSEGVNCLAYDEAIMAQQDRIQQEIAVQNPLVSERLELSVLYKEYAEDDNIYQQKIKDLHKKYSYIRKTRPDGNCFYRAFGFSHLEALLDDSKELQRFKAVSAKSKEDLVSQGFTEFTIEDFHNTFMDLIEQVEKQTSVADLLASFNDQSTSDYLVVYLRLLTSGYLQRESKFFEHFIEGGRTVKEFCQQEVEPMCKESDHIHIIALAQALSVSIQVEYMDRGEGGTTNPHIFPEGSEPKVYLLYRPGHYDILYK

SEQ ID NO: 103 - protein, 520 aa, Homo sapiens
MAALPGTVPRMMRPAPGQNYPRTGFPLEVSTPLGQGRVNQLGGVFINGRPLPNHIRHKIVEMAHHGIRPCVISRQLRVSHGCVSKILCRYQETGSIRPGAIGGSKPRQVATPDVEKKIEEYKRENPGMFSWEIRDRLLKDGHCDRSTVPSGLVSSISRVLRIKFGKKEEEDEADKKEDDGEKKAKHSIDGILGDKGNRLDEGSDVESEPDLPLKRKQRRSRTTFTAEQLEELEKAFERTHYPDIYTREELAQRTKLTEARVQVWFSNRRARWRKQAGANQLAAFNHLLPGGFPPTGMPTLPPYQLPDSTYPTTTISQDGGSTVHRPQPLPPSTMHQGGLAAAAAAADTSSAYGARHSFSSYSDSFMNPAAPSNHMNPVSNGLSPQVMSILGNPSAVPPQPQADFSISPLHGGLDSATSISASCSQRADSIKPGDSLPTSQAYCPPTYSTTGYSVDPVAGYQYGQYGQSECLVPWASPVPIPSPTPRASCLFMESYKVVSGWGMSISQMEKLKSSQMEQFT

SEQ ID NO: 104 - protein, 163 aa, Homo sapiens
MRRLLIPLALWLGAVGVGVAELTEAQRRGLQVALEEFHKHPPVQWAFQETSVESAVDTPFPAGIFVRLEFKLQQTSCRKRDWKKPECKVRPNGRKRKCLACIKLGSEDKVLGRLVHCPIETQVLREAEEHQETQCLRVQRAGEDPHSFYFPGQFAFSKALPRS

SEQ ID NO: 105 - protein, 562 aa, Homo sapiens
RHSTAVKMAAAAWLQVLPVILLLLGAHPSPLSFFSAGPATVAAADRSKWHIPIPSGKNYFSFGKILFRNTTIFLKFDGEPCDLSLNITWYLKSADCYNEIYNFKAEEVELYLEKLKEKRGLSGKYQTSSKLFQNCSELFKTQTFSGDFMHRLPLLGEKQEAKENGTNLTFIGDKTAMHEPLQTWQDAPYIFIVHIGISSSKESSKENSLSNLFTMTVEVKGPYEYLTLEDYPLMIFFMVMCIVYVLFGVLWLAWSACYWRDLLRIQFWIGAVIFLGMLEKAVFYAEFQNIRYKGESVQGALILAELLSAVKRSLARTLVIIVSLGYGIVKPRLGVTLHKVVVAGALYLLFSGMEGVLRVTGAQTDLASLAFIPLAFLDTALCWWIFISLTQTMKLLKLRRNIVKLSLYRHFTNTLILAVAASIVFIIWTTMKFRIVTCQSDWRELWVDDAIWRLLFSMILFVIMVLWRPSANNQRFAFSPLSEEEEEDEQKEPMLKESFEGMKMRSTKQEPNGNSKVNKAQEDDLKWVEENVPSSVTDVALPALLDSDEERMITHFERSKME

SEQ ID NO: 106 - protein, 511 aa, Homo sapiens
MSTLLINQPQYAWLKELGLREENEGVYNGSWGGRGEVITTYCPANNEPIARVRQASVADYEETVKKAREAWKIWADIPAPKRGEIVRQIGDALREKIQVLGSLVSLEMGKILVEGVGEVQEYVDICDYAVGLSRMIGGPILPSERSGHALIEQWNPVGLVGIITAFNFPVAVYGWNNAIAMICGNVCLWKGAPTTSLISVAVTKIIAKVLEDNKLPGAICSLTCGGADIGTAMAKDERVNLLSFTGSTQVGKQVGLMVQERFGRSLLELGGNNAIIAFEDADLSLVVPSALFAAVGTAGQRCTTARRLFIHESIHDEVVNRLKKAYAQIRVGNPWDPNVLYGPLHTKQAVSMFLGAVEEAKKEGGTVVYGGKVMDRPGNYVEPTIVTGLGHDASIAHTETFAPILYVFKFKNEEEVFAWNNEVKQGLSSSIFTKDLGRIFRWLGPKGSDCGIVNVNIPTSGAEIGGAFGGEKHTGGGRESGSDAWKQYMRRSTCTINYSKDLPLAQGIKFQ

SEQ ID NO: 107 - protein, 549 aa, Homo sapiens
MASASSGPSSSVGFSSFDPAVPSCTLSSASGIKRPMASEVPYASGMPIKKIGHRSVDSSGETTYKKTTSSALKGAIQLGITHTVGSLSTKPERDVLMQDFYVVESIFFPSEGSNLTPAHHYNDFRFKTYAPVAFRYFRELFGIRPDDYLYSLCSEPLIELCSSGASGSLFYVSSDDEFIIKTVQHKEAEFLQKLLPGYYMNLNQNPRTLLPKFYGLYCVQAGGKNIRIVVMNNLLPRSVKMHIKYDLKGSTYKRRASQKEREKPLPTFKDLDFLQDIPDGLFLDADMYNALCKTLQRDCLVLQSFKIMDYSLLMSIHNIDHAQREPLSSETQYSVDTRRPAPQKALYSTAMESIQGEARRGGTMETDDHMGGIPARNSKGERLLLYIGIIDILQSYRFVKKLEHSWKALVHDGDTVSVHRPGFYAERFQRFMCNTVFKKIPLKPSPSKKFRSGSSFSRRAGSSGNSCITYQPSVSGEHKAQVTTKAEVEPGVHLGRPDVLPQTPPLEEISEGSPIPDPSFSPLVGETLQMLTTSTTLEKLEVAESEFTH

SEQ ID NO: 108 - protein, 1146 aa, Homo sapiens
MAVPARTCGASRPGPARTARPWPGCGPHPGPGTRRPTSGPPRPLWLLLPLLPLLAAPGASAYSFPQQHTMQHWARRLEQEVDGVMRIFGGVQQLREIYKDNRNLFEVQENEPQKLVEKVAGDIESLLDRKVQALKRLADAAENFQKAHRWQDNIKEEDIVYYDAKADAELDDPESEDVERGSKASTLRLDFIEDPNFKNKVNYSYAAVQIPTDIYKGSTVILNELNWTEALENVFMENRRQDPTLLWQVFGSATGVTRYYPATPWRAPKKIDLYDVRRRPWYIQGASSPKDMVIIVDVSGSVSGLTLKLMKTSVCEMLDTLSDDDYVNVASFNEKAQPVSCFTHLVQANVRNKKVFKEAVQGMVAKGTTGYKAGFEYAFDQLQNSNITRANCNKMIMMFTDGGEDRVQDVFEKYNWPNRTVRVFTFSVGQHNYDVTPLQWMACANKGYYFEIPSIGAIRINTQEYLDVLGRPMVLAGKEAKQVQWTNVYEDALGLGLVVTGTLPVFNLTQDGPGEKKNQLILGVMGIDVALNDIKRLTPNYTLGANGYVFAIDLNGYVLLHPNLKPQTTNFREPVTLDFLDAELEDENKEEIRRSMIDGNKGHKQIRTLVKSLDERYIDEVTRNYTWVPIRSTNYSLGLVLPPYSTFYLQANLSDQILQVKYFEFLLPSSFESEGHVFIAPREYCKDLNASDNNTEFLKNFIELMEKVTPDSKQCNNFLLHNLILDTGITQQLVERVWRDQDLNTYSLLAVFAATDGGITRVFPNKAAEDWTENPEPFNASFYRRSLDNHGYVFKPPHQDALLRPLELENDTVGILVSTAVELSLGRRTLRPAVVGVKLDLEAWAEKFKVLASNRTHQDQPQKCGPNSHCEMDCEVNNEDLLCVLIDDGGFLVLSNQNHQWDQVGRFFSEVDANLMLALYNNSFYTRKESYDYQAACAPQPPGNLGAAPRGVFVPTVADFLNLAWWTSAAAWSLFQQLLYGLIYHSWFQADPAEAEGSPETRESSCVMKQTQYYFGSVNASYNAIIDCGNCSRLFHAQRLTNTNLLFVVAEKPLCSQCEAGRLLQKETHCCPADGPEQCELVQRPRYRRGPHICFDYNATEDTSDCGRGASFPPSLGVLVSLQLLLLLGLPPRPQPQVLVHASRRL

SEQ ID NO: 109 - protein, 281 aa, Homo sapiens
MFPAQEEADRTVFVGNLEARVREEILYELFLQAGPLTKVTICKDREGKPKSFGFVCFKHPESVSYAIALLNGIRLYGRPINVQYRFGSSRSSEPANQSFESCVKINSHNYRNEEMLVGRSSFPMQYFPINNTSLPQEYFLFQKMQWHVYNPVLQLPYYEMTAPLPNSASVSSSLNHVPDLEAGPSSYKWTHQQPSDSDLYQMTAPLPNSASVSSSLNHVPDLEAGPSSYKWTHQQPSDSDLYQMNKRKRQKQTSDSDSSTDNNRGNECSQKFRKSKKKKRY

SEQ ID NO: 110 - protein, 673 aa, Homo sapiens
MASQFCLPESPCLSPLKPLKPHFGDIQEGIYVAIQRSDKRIHLAVVTEINRENYWVTVEWVEKAVKKGKKIDLETILLLNPALDSAEHPMPPPPLSPLALAPSSAIRDQRTATKWVAMIPQKNQTASGDSLDVRVPSKPCLMKQKKSPCLWEIQKLQEQREKRRRLQQEIRARRALDVNTRNPNYEIMHMIEEYRRHLDSSKISVLEPPQEHRICVCVRKRPLNQRETTLKDLDIITVPSDNVVMVHESKQKVDLTRYLQNQTFCFDHAFDDKASNELVYQFTAQPLVESIFRKGMATCFAYGQTGSGKTYTMGGDFSGTAQDCSKGIYALVAQDVFLLLRNSTYEKLDLKVYGTFFEIYGGKVYDLLNWKKKLQVLEDGNQQIQVVGLQEKEVCCVEEVLNLVEIGNSCRTSRQTPVNAHSSRSHAVFQIILKSGRIMHGKFSLVDLAGNERGADTTKASRKRQLEGAEINKSLLALKECILALGQNKPHTPFRASKLTLVLRDSFIGQNSSTCMIATISPGMTSCENTLNTLRYANRVKKLNVDVRPYHRGHYPIGHEAPRMLKSHIGNSEMSLQRDEFIKIPYVQSEEQKEIEEVETLPTLLGKDTTISGKGSSQWLENIQERAGGVHHDIDFCIARSLSILEQKIDALTEIQKKLKLLLADLHVKSKVE

SEQ ID NO: 111 - protein, 1663 aa, Homo sapiens
MKDAAEELSFARVLLQRVDELEKLFKDREQFLELVSRKLSLVPGAEEVTMVTWEELEQAITDGWRASQAGSETLMGFSKHGGFTSLTSPEGTLSGDSTKQPSIEQALDSASGLGPDRTASGSGGTAHPSDGVSSREQSKVPSGTGRQQQPRARDEAGVPRLHQSSTFQFKSDSDRHRSREKLTSTQPRRNARPGPVQQDLPLARDQPSSVPASQSQVHLRPDRRGLEPTGMNQPGLVPASTYPHGVVPLSMGQLGVPPPEMDDRELIPFVVDEQRMLPPSVPGRDQQGLELPSTDQHGLVSVSAYQHGMTFPGTDQRSMEPLGMDQRGCVISGMGQQGLVPPGIDQQGLTLPVVDQHGLVLPFTDQHGLVSPGLMPISADQQGFVQPSLEATGFIQPGTEQHDLIQSGRFQRALVQRGAYQPGLVQPGADQRGLVRPGMDQSGLAQPGADQRGLVWPGMDQSGLAQPGRDQHGLIQPGTGQHDLVQSGTGQGVLVQPGVDQPGMVQPGRFQRALVQPGAYQPGLVQPGADQIDVVQPGADQHGLVQSGADQSDLAQPGAVQHGLVQPGVDQRGLAQPRADHQRGLVPPGADQRGLVQPGADQHGLVQPGVDQHGLAQPGEVQRSLVQPGIVQRGLVQPGAVQRGLVQPGAVQRGLVQPGVDQRGLVQPGAVQRGLVQPGAVQHGLVQPGADQRGLVQPGVDQRGLVQPGVDQRGLVQPGMDQRGLIQPGADQPGLVQPGAGQLGMVQPGIGQQGMVQPQADPHGLVQPGAYPLGLVQPGAYLHDLSQSGTYPRGLVQPGMDQYGLRQPGAYQPGLIAPGTKLRGSSTFQADSTGFISVRPYQHGMVPPGREQYGQVSPLLASQGLASPGIDRRSLVPPETYQQGLMHPGTDQHSPIPLSTGLGSTHPDQQHVASPGPGEHDQVYPDAAQHGHAFSLFDSHDSMYPGYRGPGYLSADQHGQEGLDPNRTRASDRHGIPAQKAPGQDVTLFRSPDSVDRVLSEGSEVSSEVLSERRNSLRRMSSSFPTAVETFHLMGELSSLYVGLKESMKDLDEEQAGQTDLEKIQFLLAQMVKRTIPPELQEQLKTVKTLAKEVWQEKAKVERLQRILEGEGNQEAGKELKAGELRLQLGVLRVTVADIEKELAELRESQDRGKAAMENSVSEASLYLQDQLDKLRMIIESMLTSSSTLLSMSMAPHKAHTLAPGQIDPEATCPACSLDVSHQVSTLVRRYEQLQDMVNSLAVSRPSKKAKLQRQDEELLGRVQSAILQVQGDCEKLNITTSNLIEDHRQKQKDIAMLYQGLEKLEKEKANREHLEMEIDVKADKSALATKVSRVQFDATTEQLNHMMQELVAKMSGQEQDWQKMLDRLLTEMDNKLDRLELDPVKQLLEDRWKSLRQQLRERPPLYQADEAAAMRRQLLAHFHCLSCDRPLETPVTGHAIPVTPAGPGLPGHHSIRPYTVFELEQVRQHSRNLKLGSAFPRGDLAQMEQSVGRLRSMHSKMLMNIEKVQIHFGGSTKASSQIIRELLHAQCLGSPCYKRVTDMADYTYSTVPRRCGGSHTLTYPYHRSRPQHLPRGLYPTEEIQIAMKHDEVDILGLDGHIYKGRMDTRLPGILRKDSSGTSKRKSQQPRPHVHRPPSLSSNGQLPSRPQSAQISAGNTSER

SEQ ID NO: 112 - protein, 380 aa, Homo sapiens
MASLPVLQKESVFQSGAHAYRIPALLYLPGQQSLLAFAEQRASKKDEHAELIVLRRGDYDAPTHQVQWQAQEVVAQARLDGHRSMNPCPLYDAQTGTLFLFFIAIPGQVTEQQQLQTRANVTRLCQVTSTDHGRTWSSPRDLTDAAIGPAYREWSTFAVGPGHCLQLHDRARSLVVPAYAYRKLHPIQRPIPSAFCFLSHDHGRTWARGHFVAQDTLECQVAEVETGEQRVVTLNARSHLRARVQAQSTNDGLDFQESQLVKKLVEPPPQGCQGSVISFPSPRSGPGSPAQWLLYTHPTHSWQRADLGAYLNPRPPAPEAWSEPVLLAKGSCAYSDLQSMGTGPDGSPLFGCLYEANDYEEIVFLMFTLKQAFPAEYLPQ

SEQ ID NO: 113 - protein, 541 aa, Homo sapiens
MLSPQRVAAAASRGADDAMESSKPGPVQVVLVQKDQHSFELDEKALASILLQDHIRDLDVVVVSVAGAFRKGKSFILDFMLRYLYSQKESGHSNWLGDPEEPLTGFSWRGGSDPETTGIQIWSEVFTVEKPGGKKVAVVLMDTQGAFDSQSTVKDCATIFALSTMTSSVQIYNLSQNIQEDDLQQLQLFTEYGRLAMDEIFQKPFQTLMFLVRDWSFPYEYSYGLQGGMAFLDKRLQVKEHQHEEIQNVRNHIHSCFSDVTCFLLPHPGLQVATSPDFDGKLKDIAGEFKEQLQALIPYVLNPSKLMEKEINGSKVTCRGLLEYFKAYIKIYQGEDLPHPKSMLQATAEANNLAAAASAKDIYYNNMEEVCGGEKPYLSPDILEEKHCEFKQLALDHFKKTKKMGGKDFSFRYQQELEEEIKELYENFCKHNGSKNVFSTFRTPAVLFTGIVALYIASGLTGFIGLEVVAQLFNCMVGLLLIALLTWGYIRYSGQYRELGGAIDFGAAYVLEQASSHIGNSTQATVRDAVVGRPSMDKKAQ

SEQ ID NO: 114 - protein, 96 aa, Homo sapiens
MAEVEETLKRIQSHKGVIGTMVVNAEGIPIRTTLDNSTTVQYAGLLHHLTMKAKSTVRDIDPQNDLTFLRIRSKKHEIMVAPDKEYLLIVIQNPCE

SEQ ID NO: 115 - protein, 452 aa, Homo sapiens
MACRSCVVGFSSLSSCEVTPVGSPRPGTSGWDSCRAPGPGFSSRSLTGCWSAGTISKVTVNPGLLVPLDVKLDPAVQQLKNQEKEEMKALNDKFASLIGKVQALEQRNQLLETRWSFLQGQDSAIFDLGHLYEEYQGRLQEELRKVSQERGQLEANLLQVLEKVEEFRIRYEDEISKRTDMEFTFVQLKKDLDAECLHRTELETKLKSLESFVELMKTIYEQELKDLAAQVKDVSVTVGMDSRCHIDLSGIVEEVKAQYDAVAARSLEEAEAYSRSQLEEQAARSAEYGSSLQSSRSEIADLNVRIQKLRSQILSVKSHCLKLEENIKTAEEQGELAFQDAKTKLAQLEAALQQAKQDMARQLRKYQELMNVKLALDIEIATYRKLVEGEEGRMDSPSATVVSAVQSRCKTAASRSGLSKAPSRKKKGSKGPVIKITEMSEKYFSQESEVSE

SEQ ID NO: 116 - protein, 359 aa, Homo sapiens
MAAVSGLVRRPLREVSGLLKRRFHWTAPAALQVTVRDAINQGMDEELERDEKVFLLGEEVAQYDGAYKVSRGLWKKYGDKRIIDTPISEMGFAGIAVGAAMAGLRPICEFMTFNFSMQAIDQVINSAAKTYYMSGGLQPVPIVFRGPNGASAGVAAQHSQCFAAWYGHCPGLKVVSPWNSEDAKGLIKSAIRDNNPVVVLENELMYGVPFEFPPEAQSKDFLIPIGKAKIERQGTHITVVSHSRPVGHCLEAAAVLSKEGVECEVINMRTIRPMDMETIEASVMKTNHLVTVEGGWPQFGVGAEICARIMEGPAFNFLDAPAVRVTGADVPMPYAKILEDNSIPQVKDIIFAIKKTLNI

SEQ ID NO: 117 - protein, 703 aa, Homo sapiens
MAAATGDPGLSKLQFAPFSSALDVGFWHELTQKKLNEYRLDEAPKDIKGYYYNGDSAGLPARLTLEFSAFDMSAPTPARCCPAIGTLYNTNTLESFKTADKKLLLEQAANEIWESIKSGTALENPVLLNKFLLLTFADLKKYHFYYWFCYPALCLPESLPLIQGPVGLDQRFSLKQIEALECAYDNLCQTEGVTALPYFLIKYDENMVLVSLLKHYSDFFQGQRTKITIGVYDPCNLAQYPGWPLRNFLVLAAHRWSSSFQSVEVVCFRDRTMQGARDVAHSIIFEVKLPEMAFSPDCPKAVGWEKNQKGGMGPRMVNLSECMDPKRLAESSVDLNLKLMCWRLVPTLDLDKVVSVKCLLLGAGTLGCNVARTLMGWGVRHITFVDNAKISYSNPVRQPLYEFEDCLGGGKPKALAAADRLQKIFPGVNARGFNMSIPMPGHPVNFSSVTLEQARRDVEQLEQLIESHDVVFLLMDTRESRWLPAVIAASKRKLVINAALGFDTFVVMRHGLKKPKQQGAGDLCPNHPVASADLLGSSLFANIPGYKLGCYFCNDVVAPGDSTRDRTLDQQCTVSRPGLAVIAGALAVELMVSVLQHPEGGYAIASSSDDRMNEPPTSLGLVPHQIRGFLSRFDNVLPVSLAFDKCTACSSKVLDQYEREGFNFLAKVFNSSHSFLEDLTGLTLLHQETQAAEIWDMSDDETI

SEQ ID NO: 118 - protein, 346 aa, Homo sapiens
MEFSGRKWRKLRLAGDQRNASYPHCLQFYLQPPSENISLIEFENLAIDRVKLLKSVENLGVSYVKGTEQYQSKLESELRKLKFSYRENLEDEYEPRRRDHISHFILRLAYCQSEELRRWFIQQEMDLLRFRFSILPKDKIQDFLKDSQLQFEAISDEEKTLREQEIVASSPSLSGLKLGFESIYKIPFADALDLFRGRKVYLEDGFAYVPLKDIVAIILNEFRAKLSKALALTARSLPAVQSDERLQPLLNHLSHSYTSQDYSTQGNVGKISLDQIDLLSTKSFPLYMHQLHKALRENHHLCHGGRMQYVLFLKGIGLTLEQTLQFWKQEFIKGKMDPDKFDKGYS

SEQ ID NO: 119 - protein, 399 aa, Homo sapiens
MDSQGRKVVVCDNGTGFVKCGYAGSNFPEHIFPALVGRPIIRSTTKVGNIEIKINKKKDLMVGDEASELRSMLEVNYPMENGIVRNWDDMKHLWDYTFGPEKLNIDTRNCKILLTEPPMNPTKNREKIVEVMFETYQFSGVYVAIQAVLTLYAQGLLTGVVVDSGDGVTHICPVYEGFSLPHLTRRLDIAGRDITRYLIKLLLLRGYAFNHSADFETVRMIKEKLCYVGYNIEQEQKLALETTVLVESYTLPDGRIIKVGGERFEAPEALFQPHLINVEGVGVAELLFNTIQAADIDTRSEFYKHIVLSGGSTMYPGLPSRLERELKQLYLERVLKGDVEKLSKFKIRIEDPPRRKHMVFLGGAVLADIMKDKDNFWMTRQEYQEKGVRVLEKLGVTVR

SEQ ID NO: 120 - protein, 376 aa, Homo sapiens
MAEERPGAWFGFGFCGFGQELGSGRGRQVHSPSPLRAGVDICRVSASWSYTAFVTRGGRLELSGSASGAAGRCKDAWASEGLLAVLRAGPGPEALLQVWAAESALRGEPLWAQNVVPEAEGEDDPAGEAQAGRLPLLPCARAYVSPRAPFYRPLAPELRARQLELGAEHALLLDAAGQVFSWGGGRHGQLGHGTLEAELEPRLLEALQGLVMAEVAAGGWHSVCVSETGDIYIWGWNESGQLALPTRNLAEDGETVAREATELNEDGSQVKRTGGAEDGAPAPFIAVQPFPALLDLPMGSDAVKASCGSRHTAVVTRTGELYTWGWGKYGQLGHEDTTSLDRPRRVEYFVDKQLQVKAVTCGPWNTYVYAVEKGKS

SEQ ID NO: 121 - protein, 413 aa, Homo sapiens
MRKSPLGGGGGSGASSQAACLKQILLLQLDLIEQQQQQLQAKEKEIEELKSERDTLLARIERMERRMQLVKKDNEKERHKLFQGYETEEREETELSEKIKLECQPELSETSQTLPPKPFSCGRSGKGHKRKSPFGSTERKTPVKKLAPEFSKVKTKTPKHSPIKEEPCGSLSETVCKRELRSQETPEKPRSSVDTPPRLSTPQKGPSTHPKEKAFSSEIEDLPYLSTTEMYLCRWHQPPPSPLPLRESSPKKEETVARCLMPSSVAGETSVLAVPSWRDHSVEPLRDPNPSDLLENLDDSVFSKRHAKLELDEKRRKRWDIQRIREQRILQRLQLRMYKKKGIQESEPEVTSFFPEPDDVESLMITPFLPVVAFGRPLPKLTPQNFELPWLDERSRCRLEIQKKQTPHRTCRK

SEQ ID NO: 122 - protein, 730 aa, Homo sapiens
MLFNSVLRQPQLGVLRNGWSSQYPLQSLLTGYQCSGNDEHTSYGETGVPVPPFGCTFSSAPNMEHVLAVANEEGFVRLYNTESQSFRKKCFKEWMAHWNAVFDLAWVPGELKLVTAAGDQTAKFWDVKAGELIGTCKGHQCSLKSVAFSKFEKAVFCTGGRDGNIMVWDTRCNKKDGFYRQVNQISGAHNTSDKQTPSKPKKKQNSKGLAPSVDFQQSVTVVLFQDENTLVSAGAVDGIIKVWDLRKNYTAYRQEPIASKSFLYPGSSTRKLGYSSLILDSTGSTLFANCTDDNIYMFNMTGLKTSPVAIFNGHQNSTFYVKSSLSPDDQFLVSGSSDEAAYIWKVSTPWQPPTVLLGHSQEVTSVCWCPSDFTKIATCSDDNTLKIWRLNRGLEEKPGGDKLSTVGWASQKKKESRPGLVTVTSSQSTPAKAPRAKCNPSNSSPSSAACAPSCAGDLPLPSNTPTFSIKTSPAKARSPINRRGSVSSVSPKPPSSFKMSIRNWVTRTPSSSPPITPPASETKIMSPRKALIPVSQKSSQAEACSESRNRVKRRLDSSCLESVKQKCVKSCNCVTELDGQVENLHLDLCCLAGNQEDLSKDSLGPTKSSKIEGAGTSISEPPSPISPYASESCGTLPLPLRPCGEGSEMVGKENSSPENKNWLLAMAAKRKAENPSPRSPSSQTPNSRRQSGKKLPSPVTITPSSMRKICTYFHRKSQEDFCGPEHSTEL

SEQ ID NO: 123 - protein, 633 aa, Homo sapiens
MAAAAAAATTAACSSGSAGTDAAGASGLQQPPPQPQPQPAAAAPAQPPPEPPRKPRMDPRRRQAALSFLTNISLDGRLPPQDAEWGGGEEGGAAKPGAGGACGARTRFSLLAAAERGGCIALAAPGTPAAGLAAGSGPCLPQPSSLPPLIPGGHATVSGPGVARGFASPLGAGRASGEQWQPPRPAPLAACAQLQLLDGSGAAGQEELEEDDAFISVQVPAAAFLGSGTPGSGSGSRGRLNSFTQGILPIAFSRPTSQNYCSLEQPGQGGSTSAFEQLQRSRRRLISQRSSLETLEDIEENAPLRRCRTLSGSPRPKNFKKIHFIKNMRQHDTRNGRIVLISGRRSFCSIFSVLPYRDSTQVGDLKLDGGRQSTGAVSLKEIIGLEGVELGADGKTVSYTQFLLPTNAFGARRNTIDSTSSFSQFRNLSHRSLSIGRASGTQGSLDTGSDLGDFMDYDPNLLDDPQWPCGKHKRVLIFPSYMTTVIDYVKPSDLKKDMNETFKEKFPHIKLTLSKIRSLKREMRKLAQEDCGLEEPTVAMAFVYFEKLALKGKLNKQNRKLCAGACVLLAAKIGSDLKKHEVKHLIDKLEEKFRLNRRELIAFEFPVLVALEFALHLPEHEVMPHYRRLVQSS

SEQ ID NO: 124 - protein, 181 aa, Homo sapiens
MEAMNVEKASADGNLPEVISNIKETLKIVSRTPVNITMAGDSGNGMSTFISALRNTGHEGKASPPTELVKATQRCASYFSSHFSNVVLWDLPGTGSATTTLENYLMEMQFNRYDFIMVASAQFSMNHVMLAKTAEDMGKKFYIVWTKLDMDLSTGALPEVQLLQIRENVLENLQKERVCEY

SEQ ID NO: 125 - protein, 303 aa, Homo sapiens
MADAASQVLLGSGLTILSQPLMYVKVLIQVGYEPLPPTIGRNIFGRQVCQLPGLFSYAQHIASIDGRRGLFTGLTPRLCSGVLGTVVHGKVLQHYQESDKGEELGPGNVQKEVSSSFDHVIKETTREMIARSAATLITHPFHVITLRSMVQFIGRESKYCGLCDSIITIYREEGILGFFAGLVPRLLGDILSLWLCNSLAYLVNTYALDSGVSTMNEMKSYSQAVTGFFASMLTYPFVLVSNLMAVNNCGLAGGCPPYSPIYTSWIDCWCMLQKEGNMSRGNSLFFRKVPFGKTYCCDLKMLI

SEQ ID NO: 126 - protein, 913 aa, Homo sapiens
MGWGSRCCCPGRLDLLCVLALLGGCLLPVCRTRVYTNHWAVKIAGGFPEANRIASKYGFINIGQIGALKDYYHFYHSRTIKRSVISSRGTHSFISMEPKVEWIQQQVVKKRTKRDYDFSRAQSTYFNDPKWPSMWYMHCSDNTHPCQSDMNIEGAWKRGYTGKNIVVTILDDGIERTHPDLMQNYDALASCDVNGNDLDPMPRYDASNENKHGTRCAGEVAAAANNSHCTVGIAFNAKIGGVRMLDGDVTDMVEAKSVSFNPQHVHIYSASWGPDDDGKTVDGPAPLTRQAFENGVRMGRRGLGSVFVWASGNGGRSKDHCSCDGYTNSIYTISISSTAESGKKPWYLEECSSTLATTYSSGESYDKKIITTDLRQRCTDNHTGTSASAPMAAGIIALALEANPFLTWRDVQHVIVRTSRAGHLNANDWKTNAAGFKVSHLYGFGLMDAEAMVMEAEKWTTVPRQHVCVESTDRQIKTIRPNSAVRSIYKASGCSDNPNRHVNYLEHVVVRITITHPRRGDLAIYLTSPSGTRSQLLANRLFDHSMEGFKNWEFMTIHCWGERAAGDWVLEVYDTPSQLRNFKTPGKLKEWSLVLYGTSVQPYSPTNEFPKVERFRYSRVEDPTDDYGTEDYAGPCDPECSEVGCDGPGPDHCNDCLHYYYKLKNNTRICVSSCPPGHYHADKKRCRKCAPNCESCFGSHGDQCMSCKYGYFLNEETNSCVTHCPDGSYQDTKKNLCRKCSENCKTCTEFHNCTECRDGLSLQGSRCSVSCEDGRYFNGQDCQPCHRFCATCAGAGADGCINCTEGYFMEDGRCVQSCSISYYFDHSSENGYKSCKKCDISCLTCNGPGFKNCTSCPSGYLLDLGMCQMGAICKDATEESWAEGGFCMLVKKNNLCQRKVLQQLCCKTCTFQG

SEQ ID NO: 127 - protein, 517 aa, Homo sapiens
MAALRLLASVLGRGVPAGGSGLALSQGCARCFATSPRLRAKFYADPVEMVKDISDGATVMIGGFGLCGIPENLIAALLRTRVKDLQVVSSNVGVEDFGLGLLLAARQVRRIVCSYVGENTLCESQYLAGELELELTPQGTLAERIRAGGAGVPAFYTPTGYGTLVQEGGAPIRYTPDGHLALMSQPREVREFNGDHFLLERAIRADFALVKGWKADRAGNVVFRRSARNFNVPMCKAADVTAVEVEEIVEVGAFPPEDIHVPNIYVDRVIKGQKYEKRIERLTILKEEDGDAGKEEDARTRIIRRAALEFEDGMYANLGIGIPLLASNFISPSMTVHLHSENGILGLGPFPTEDEVDADLINAGKQTVTVLPGGCFFASDDSFAMIRGGHIQLTMLGAMQVSKYGDLANWMIPGKKVKGMGGAMDLVSSQKTRVVVTMQHCTKDNTPKIMEKCTMPLTGKRCVDRIITEKAVFDVHRKKELTLRELWEGLTVDDIKKSTGCAFAVSPNLRPMQQVAP

SEQ ID NO: 128 - protein, 367 aa, Homo sapiens
MVMEVGTLDAGGLRALLGERAAQCLLLDCRSFFAFNAGHIAGSVNVRFSTIVRRRAKGAMGLEHIVPNAELRGRLLAGAYHAVVLLDERSAALDGAKRDGTLALAAGALCREARAAQVFFLKGGYEAFSASCPELCSKQSTPMGLSLPLSTSVPDSAESGCSSCSTPLYDQGGPVEILPFLYLGSAYHASRKDMLDALGITALINVSANCPNHFEGHYQYKSIPVEDNHKADISSWFNEAIDFIDSIKNAGGRVFVHCQAGISRSATICLAYLMRTNRVKLDEAFEFVKQRRSIISPNFSFMGQLLQFESQVLAPHCSAEAGSPAMAVLDRGTSTTTVFNFPVSIPVHSTNSALSYLQSPITTSPSC

SEQ ID NO: 129 - protein, 602 aa, Homo sapiens
MPSAKQRGSKGGHGAASPSEKGAHPSGGADDVAKKPPPAPQQPPPPPAPHPQQHPQQHPQNQAHGKGGHRGGGGGGGKSSSSSSASAAAAAAAASSSASCSRRLGRALNFLFYLALVAAAAFSGWCVHHVLEEVQQVRRSHQDFSRQREELGQGLQGVEQKVQSLQATFGTFESILRSSQHKQDLTEKAVKQGESEVSRISEVLQKLQNEILKDLSDGIHVVKDARERDFTSLENTVEERLTELTKSINDNIAIFTEVQKRSQKEINDMKAKVASLEESEGNKQDLKALKEAVKEIQTSAKSREWDMEALRSTLQTMESDIYTEVRELVSLKQEQQAFKEAADTERLALQALTEKLLRSEESVSRLPEEIRRLEEELRQLKSDSHGPKEDGGFRHSEAFEALQQKSQGLDSRLQHVEDGVLSMQVASARQTESLESLLSKSQEHEQRLAALQGRLEGLGSSEADQDGLASTVRSLGETQLVLYGDVEELKRSVGELPSTVESLQKVQEQVHTLLSQDQAQAARLPPQDFLDRLSSLDNLKASVSQVEADLKMLRTAVDSLVAYSVKIETNENNLESAKGLLDDLRNDLDRLFVKVEKIHEKV

SEQ ID NO: 130 - protein, 288 aa, Homo sapiens
MSRLRALLGLGLLVAGSRVPRIKSQTIACRSGPTWWGPQRLNSGGRWDSEVMASTVVKYLSQEEAQAVDQELFNEYQFSVDQLMELAGLSCATAIAKAYPPTSMSRSPPTVLVICGPGNNGGDGLVCARHLKLFGYEPTIYYPKRPNKPLFTALVTQCQKMDIPFLGEMPAEPMTIDELYELVVDAIFGFSFKGDVREPFHSILSVLKGLTVPIASIDIPSGWDVEKGNAGGIQPDLLISLTAPKKSATQFTGRYHYLGGRFVPPALEKKYQLNLPPYPDTECVYRLQ

SEQ ID NO: 131 - protein, 431 aa, Homo sapiens
MQALNITPEQFSRLLRDHNLTREQFIALYRLRPLVYTPELPGRAKLALVLTGVLIFALALFGNALVFYVVTRSKAMRTVTNIFICSLALSDLLITFFCIPVTMLQNISDNWLGGAFICKMVPFVQSTAVVTEILTMTCIAVERHQGLVHPFKMKWQYTNRRAFTMLGVVWLVAVIVGSPMWHVQQLEIKYDFLYEKEHICCLEEWTSPVHQKIYTTFILVILFLLPLMVMLILYSKIGYELWIKKRVGDGSVLRTIHGKEMSKIARKKKRAVIMMVTVVALFAVCWAPFHVVHMMIEYSNFEKEYDDVTIKMIFAIVQIIGFSNSICNPIVYAFMNENFKKNVLSAVCYCIVNKTFSPAQRHGNSGITMMRKKAKFSLRENPVEETKGEAFSDGNIEVKLCEQTEEKKKLKRHLALFRSELAENSPLDSGH

SEQ ID NO: 132 - protein, 818 aa, Homo sapiens
MALTQVRLTFRDVAIEFSQEEWKCLDPAQRILYRDVMLENYWNLVSLGLCHFDMNIISMLEEGKEPWTVKSCVKIARKPRTPECVKGVVTDIPPKCTIKDLLPKEKSSTEAVFHTVVLERHESPDIEDFSFKEPQKNVHDFECQWRDDTGNYKGVLMAQKEGKRDQRDRRDIENKLMNNQLGVSFHSHLPELQLFQGEGKMYECNQVEKSTNNGSSVSPLQQIPSSVQTHRSKKYHELNHFSLLTQRRKANSCGKPYKCNECGKAFTQNSNLTSHRRIHSGEKPYKCSECGKTFTVRSNLTIHQVIHTGEKPYKCHECGKVFRHNSYLATHRRIHTGEKPYKCNECGKAFRGHSNLTTHQLIHTGEKPFKCNECGKLFTQNSHLISHWRIHTGEKPYKCNECGKAFSVRSSLAIHQTIHTGEKPYKCNECGKVFRYNSYLGRHRRVHTGEKPYKCNECGKAFSMHSNLATHQVIHTGTKPFKCNECSKVFTQNSQLANHRRIHTGEKPYKCNECGKAFSVRSSLTTHQAIHSGEKPYKCIECGKSFTQKSHLRSHRGIHSGEKPYKCNECGKVFAQTSQLARHWRVHTGEKPYKCNDCGRAFSDRSSLTFHQAIHTGEKPYKCHECGKVFRHNSYLATHRRIHTGEKPYKCNECGKAFSMHSNLTTHKVIHTGEKPYKCNQCGKVFTQNSHLANHQRTHTGEKPYRCNECGKAFSVRSSLTTHQAIHTGKKPYKCNECGKVFTQNAHLANHRRIHTGEKPYRCTECGKAFRVRSSLTTHMAIHTGEKRYKCNECGKVFRQSSNLASHHRMHTGEKPYK

SEQ ID NO: 133 - protein, 808 aa, Homo sapiens
MAAPQSRPRRGELILLCALLGTLWEIGRGQIRYSVPEETDKGSFVGNISKDLGLDPRKLAKHGVRIVSRGRTQLFALNPRSGSLITAGRIDREELCAQSPRCLININTLVEDKGKLFGVEIEIIDINDNNPKFQVEDLEVKINEIAVPGARYPLPEAVDPDVGVNSLQSYQLSPNHHFSLDVQTGDNGAINPELVLERALDREEEAAHHLVLTASDGGKPPRSSTVRIHVTVLDTNDNAPVFPHPIYRVKVLENMPPGTRLLTVTASDPDEGINGKVAYKFRKINEKQTPLFQLNENTGEISIAKSLDYEECSFYEMEIQAEDVGALLGRTKLLISVEDVNDNRPEVIITSLFSPVLENSLPGTVIAFLSVHDQDSGKNGQVVCYTRDNLPFKLEKSIGNYYRLVTRKYLDRENVSIYNITVMASDLGTPPLSTETQIALHVADINDNPPTFPHASYSAYILENNLRGASIFSLTAHDPDSQENAQVTYSVTEDTLQGAPLSSYISINSDTGVLYALQSFDYEQIRDLQLLVTASDSGDPPLSSNMSLSLFVLDQNDNAPEILYPALPTDGSTGVELAPRSAERGYLVTKVVAVDRDSGQNAWLSYRLLKASEPGLFSVGLHTGEVRTARALLDRDALKQSLVVAVQDHGQPPLSATVTLTVAVADSIPEVLTELGSLKPSVDPNDSSLTLYLVVAVAAISCVFLAFVAVLLGLRLRRWHKSRLLQDSGGRLVGVPASHFVGVEEVQAFLQTYSQEVSLTADSRKSHLIFPQPNYADMLISQEGCEKNDSLLTSVDFHEYKNEADHGQ

SEQ ID NO: 134 - protein, 122 aa, Homo sapiens
MAAPVDLELKKAFTELQAKVIDTQQKVKLADIQIEQLNRTKKHAHLTDTEIMTLVDETNMYEGVGRMFILQSKEAIHSQLLEKQKIAEEKIKELEQKKSYLERSVKEAEDNIREMLMARRAQ

SEQ ID NO: 135 - protein, 375 aa, Homo sapiens
MMCQSEARQGPELRAAKWLHFPQLALRRRLGQLSCMSRPALKLRSWPLTVLYYLLPFGALRPLSRVGWRPVSRVALYKSVPTRLLSRAWGRLNQVELPHWLRRPVYSLYIWTFGVNMKEAAVEDLHHYRNLSEFFRRKLKPQARPVCGLHSVISPSDGRILNFGQVKNCEVEQVKGVTYSLESFLGPRMCTEDLPFPPAASCDSFKNQLVTREGNELYHCVIYLAPGDYHCFHSPTDWTVSHRRHFPGSLMSVNPGMARWIKELFCHNERVVLTGDWKHGFFSLTAVGATNVGSIRIYFDRDLHTNSPRHSKGSYNDFSFVTHTNREGVPMRKGEHLGEFNLGSTIVLIFEAPKDFNFQLKTGQKIRFGEALGSL

SEQ ID NO: 136 - protein, 448 aa, Homo sapiens
MRECISVHVGQAGVQMGNACWELYCLEHGIQPDGQMPSDKTIGGGDDSFTTFFCETGAGKHVPRAVFVDLEPTVIDEIRNGPYRQLFHPEQLITGKEDAANNYARGHYTIGKEIIDPVLDRIRKLSDQCTGLQGFLVFHSFGGGTGSGFTSLLMERLSVDYGKKSKLEFSIYPAPQVSTAVVEPYNSILTTHTTLEHSDCAFMVDNEAIYDICRRNLDIERPTYTNLNRLISQIVSSITASLRFDGALNVDLTEFQTNLVPYPRIHFPLATYAPVISAEKAYHEQLSVAEITNACFEPANQMVKCDPRHGKYMACCLLYRGDVVPKDVNAAIAAIKTKRSIQFVDWCPTGFKVGINYQPPTVVPGGDLAKVQRAVCMLSNTTAIAEAWARLDHKFDLMYAKRAFVHWYVGEGMEEGEFSEAREDMAALEKDYEEVGIDSYEDEDEGEE

SEQ ID NO: 137 - protein, 442 aa, Homo sapiens
MASVVLPSGSQCAAAAAAAAPPGLRLRLLLLLFSAAALIPTGDGQNLFTKDVTVIEGEVATISCQVNKSDDSVIQLLNPNRQTIYFRDFRPLKDSRFQLLNFSSSELKVSLTNVSISDEGRYFCQLYTDPPQESYTTITVLVPPRNLMIDIQKDTAVEGEEIEVNCTAMASKPATTIRWFKGNTELKGKSEVEEWSDMYTVTSQLMLKVHKEDDGVPVICQVEHPAVTGNLQTQRYLEVQYKPQVHIQMTYPLQGLTREGDALELTCEAIGKPQPVMVTWVRVDDEMPQHAVLSGPNLFINNLNKTDNGTYRCEASNIVGKAHSDYMLYVYDPPTTIPPPTTTTTTTTTTTTTILTIITDSRAGEEGSIRAVDHAVIGGVVAVVVFAMLCLLIILGRYFARHKGTYFTHEAKGADDAADADTAIINAEGGQNNSEEKKEYFI

SEQ ID NO: 138 - protein, 738 aa, Homo sapiens
MHCMSGHSNFVSCVCIIPSSDIYPHGLIATGGNDHNICIFSLDSPMPLYILKGHKNTVCSLSSGKFGTLLSGSWDTTAKVWLNDKCMMTLQGHTAAVWAVKILPEQGLMLTGSADKTVKLWKAGRCERTFSGHEDCVRGLAILSETEFLSCANDASIRRWQITGECLEVYYGHTNYIYSISVFPNCRDFVTTAEDRSLRIWKHGECAQTIRLPAQSIWCCCVLDNGDIVVGASDGIIRVFTESEDRTASAEEIKAFEKELSHATIDSKTGDLGDINAEQLPGREHLNEPGTREGQTRLIRDGEKVEAYQWSVSEGRWIKIGDVVGSSGANQQTSGKVLYEGKEFDYVFSIDVNEGGPSYKLPYNTSDDPWLTAYNFLQKNDLNPMFLDQVAKFIIDNTKGQMLGLGNPSFSDPFTGGGRYVPGSSGSSNTLPTADPFTGAGRYVPGSASMGTTMAGVDPFTGNSAYRSAASKTMNIYFPKKEAVTFDQANPTQILGKLKELNGTAPEEKKLTEDDLILLEKILSLICNSSSEKPTVQQLQILWKAINCPEDIVFPALDILRLSIKHPSVNENFCNEKEGAQFSSHLINLLNPKGKPANQLLALRTFCNCFVGQAGQKLMMSQRESLMSHAIELKSGSNKNIHIALATLALNYSVCFHKDHNIEGKAQCLSLISTILEVVQDLEATFRLLVALGTLISDDSNAVQLAKSLGVDSQIKKYSSVSEPAKVSECCRFILNLL

SEQ ID NO: 139 - protein, 655 aa, Homo sapiens
MGTSPSSSTALASCSRIARRATATMIAGSLLLLGFLSTTTAQPEQKASNLIGTYRHVDRATGQVLTCDKCPAGTYVSEHCTNTSLRVCSSCPVGTFTRHENGIEKCHDCSQPCPWPMIEKLPCAALTDRECTCPPGMFQSNATCAPHTVCPVGWGVRKKGTETEDVRCKQCARGTFSDVPSSVMKCKAYTDCLSQNLVVIKPGTKETDNVCGTLPSFSSSTSPSPGTAIFPRPEHMETHEVPSSTYVPKGMNSTESNSSASVRPKVLSSIQEGTVPDNTSSARGKEDVNKTLPNLQVVNHQQGPHHRHILKLLPSMEATGGEKSSTPIKGPKRGHPRQNLHKHFDINEHLPWMIVLFLLLVLVVIVVCSIRKSSRTLKKGPRQDPSAIVEKAGLKKSMTPTQNREKWIYYCNGHGIDILKLVAAQVGSQWKDIYQFLCNASEREVAAFSNGYTADHERAYAALQHWTIRGPEASLAQLISALRQHRRNDVVEKIRGLMEDTTQLETDKLALPMSPSPLSPSPIPSPNAKLENSALLTVEPSPQDKNKGFFVDESEPLLRCDSTSSGSSALSRNGSFITKEKKDTVLRQVRLDPCDLQPIFDDMLHFLNPEELRVIEEIPQAEDKLDRLFEIIGVKSQEASQTLLDSVYSHLPDLL

SEQ ID NO: 140 - protein, 655 aa, Homo sapiens
PQPGSLNSSIWDGSEVLRRIRGPLLAQEMPTVSVLEYALPQRPPQGPEDDRDLSERALPRRSTSPIIGSPPVRAVPIGTPPKQMAVPSFTQQILCPKPVHVRPPMPPRYPAPYGERMSPNQLCSVPNSSLLGHPFPPSVPPVLSPLQRAQLLGGAQLQPGRMSPSQFARVPGFVGSPLAAMNPKLLQGRVGQMLPPAPGFRAFFSAPPSATPPPQQHPPGPGPHLQNLRSQAPMFRPDTTHLHPQHRRLLHQRQQQNRSQHRNLNGAGDRGSHRSSHQDHLRKDPYANLMLQREKDWVSKIQMMQLQSTDPYLDDFYYQNYFEKLEKLSAAEEIQGDGPKKERTKLITPQVAKLEHAYKPVQFEGSLGKLTVSSVNNPRKMIDAVVTSRSEDDETKEKQVRDKRRKTLVIIEKTYSLLLDVEDYERRYLLSLEEERPALMDDRKHKICSMYDNLRGKLPGQERPSDDHFVQIMCIRKGKRMVARILPFLSTEQAADILMTTARNLPFLIKKDAQDEVLPCLLSPFSLLLYHLPSVSITSLLRQLMNLPQSAATPALSNPHLTAVLQNKFGLSLLLILLSRGEDLQSSDPATESTQNNQWTEVMFMATRELLRIPQAALAKPISIPTNLVSLFSRYVDRQKLNLLETKLQLVQGIR

SEQ ID NO: 141 - protein, 1452 aa, Homo sapiens
MRGLGTCLATLAGLLLTAAGETFSGGCLFDEPYSTCGYSQSEGDDFNWEQVNTLTKPTSDPWMPSGSFMLVNASGRPEGQRAHLLLPQLKENDTHCIDFHYFVSSKSNSPPGLLNVYVKVNNGPLGNPIWNISGDPTRTWNRAELAISTFWPNFYQVIFEVITSGHQGYLAIDEVKVLGHPCTRTPHFLRIQNVEVNAGQFATFQCSAIGRTVAGDRLWLQGIDVRDAPLKEIKVTSSRRFIASFNVVNTTKRDAGKYRCMIRTEGGVGISNYAELVVKEPPVPIAPPQLASVGATYLWIQLNANSINGDGPIVAREVEYCTASGSWNDRQPVDSTSYKIGHLDPDTEYEISVLLTRPGEGGTGSPGPALRTRTKCADPMRGPRKLEVVEVKSRQITIRWEPFGYNVTRCHSYNLTVHYCYQVGGQEQVREEVSWDTENSHPQHTITNLSPYTNVSVKLILMNPEGRKESQELIVQTDEDLPGAVPTESIQGSTFEEKIFLQWREPTQTYGVITLYEITYKAVSSFDPEIDLSNQSGRVSKLGNETHFLFFGLYPGTTYSFTIRASTAKGFGPPATNQFTTKISAPSMPAYELETPLNQTDNTVTVMLKPAHSRGAPVSVYQIVVEEERPRRTKKTTEILKCYPVPIHFQNASLLNSQYYFAAEFPADSLQAAQPFTIGDNKTYNGYWNTPLLPYKSYRIYFQAASRANGETKIDCVQVATKGAATPKPVPEPEKQTDHTVKIAGVIAGILLFVIIFLGVVLVMKKRKLAKKRKETMSSTRQEMTVMVNSMDKSYAEQGTNCDEAFSFMDTHNLNGRSVSSPSSFTMKTNTLSTSVPNSYYPDETHTMASDTSSLVQSHTYKKREPADVPYQTGQLHPAIRVADLLQHITQMKCAEGYGFKEEYESFFEGQSAPWDSAKKDENRMKNRYGNIIAYDHSRVRLQTIEGDTNSDYINGNYIDGYHRPNHYIATQGPMQETIYDFWRMVWHENTASIIMVTNLVEVGRVKCCKYWPDDTEIYKDIKVTLIETELLAEYVIRTFAVEKRGVHEIREIRQFHFTGWPDHGVPYHATGLLGFVRQVKSKSPPSAGPLVVHCSAGAGRTGCFIVIDIMLDMAEREGVVDIYNCVRELRSRRVNMVQTEEQYVFIHDAILEACLCGDTSVPASQVRSLYYDMNKLDPQTNSSQIKEEFRTLNMVTPTLRVEDCSIALLPRNHEKNRCMDILPPDRCLPFLITIDGESSNYINAALMDSYKQPSAFIVTQHPLPNTVKDFWRLVLDYHCTSVVMLNDVDPAQLCPQYWPENGVHRHGPIQVEFVSADLEEDIISRIFRIYNAARPQDGYRMVQQFQFLGWPMYRDTPVSKRSFLKLIRQVDKWQEEYNGGEGRTVVHCLNGGGRSGTFCAISIVCEMLRHQRTVDVFHAVKTLRNNKPNMVDLLDQYKFCYEVALEYLNSG

SEQ ID NO: 142 - protein, 1591 aa, Homo sapiens
MSLLCVRVKRAKFQGSPDKFNTYVTLKVQNVKSTTVAVRGDQPSWEQDFMFEISRLDLGLSVEVWNKGLIWDTMVGTVWIALKTIRQSDEEGPGEWSTLEAETLMKDDEICGTRNPTPHKILLDTRFELPFDIPEEEARYWTYKWEQINALGADNEYSSQEESQRKPLPTAAAQCSFEDPDSAVDDRDSDYRSETSNSFPPPYHTASQPNASVHQFPVPVRSPQQLLLQGSSRDSCNDSMQSYDLDYPERRAISPTSSSRYGSSCNVSQGSSQLSELDQYHEQDDDHRETDSIHSCHSSHSLSRDGQAGFGEQEKPLEVTGQAEKEAACEPKEMKEDATTHPPPDLVLQKDHFLGPQESFPEENASSPFTQARAHWIRAVTKVRLQLQEIPDDGDPSLPQWLPEGPAGGLYGIDSMPDLRRKKPLPLVSDLSLVQSRKAGITSAMATRTSLKDEELKSHVYKKTLQALIYPISCTTPHNFEVWTATTPTYCYECEGLLWGIARQGMRCSECGVKCHEKCQDLLNADCLQRAAEKSCKHGAEDRTQNIIMAMKDRMKIRERNKPEIFEVIRDVFTVNKAAHVQQMKTVKQSVLDGTSKWSAKITITVVCAQGLQAKDKTGSSDPYVTVQVSKTKKRTKTIFGNLNPVWEEKFHFECHNSSDRIKVRVWDEDDDIKSRVKQRLKRESDDFLGQTIIEVRTLSGEMDVWYNLEKRTDKSAVSGAIRLQISVEIKGEEKVAPYHVQYTCLHENLFHYLTDIQGSGGVRIPEARGDDAWKVYFDETAQEIVDEFAMRYGIESIYQAMTHFACLSSKYMCPGVPAVMSTLLANINAYYAHTTASTNVSASDRFAASNFGKERFVKLLDQLHNSLRIDLSTYRNNFPAGSPERLQDLKSTVDLLTSITFFRMKVQELQSPPRASQVVKDCVKACLNSTYEYIFNNCHDLYSRQYQLKQELPPEEQGPSIRNLDFWPKLITLIVSIIEEDKNSYTPVLNQFPQELNVGKVSAEVMWHLFAQDMKYALEEHEKDHLCKSADYMNLHFKVKWLHNEYVRDLPVLQGQVPEYPAWFEQFVLQWLDENEDVSLEFLRGALERDKKDGFQQTSEHALFSCSVVDVFTQLNQSFEIIRKLECPDPSILAHYMRRFAKTIGKVLMQYADILSKDFPAYCTKEKLPCILMNNVQQLRVQLEKMFEAMGGKELDLEAADSLKELQVKLNTVLDELSMVFGNSFQVRIDECVRQMADILGQVRGTGNASPDARASAAQDADSVLRPLMDFLDGNLTLFATVCEKTVLKRVLKELWRVVMNTMERMIVLPPLTDQTGTQLIFTAAKELSHLSKLKDHMVREETRNLTPKQCAVLDLALDTIKQYFHAGGNGLKKTFLEKSPDLQSLRYALSLYTQTTDTLIKTFVRSQTTQGSGVDDPVGEVSIQVDLFTHPGTGEHKVTVKVVAANDLKWQTAGMFRPFVEVTMVGPHQSDKKRKFTTKSKSNNWAPKYNETFHFLLGNEEGPESYELQICVKDYCFAREDRVLGLAVMPLRDVTAKGSCACWCPLGRKIHMDETGLTILRILSQRSNDEVAREFVKLKSESRSTEEGS

SEQ ID NO: 143 - protein, 999 aa, Homo sapiens
MGPAPLPLLLGLFLPALWRRAITEAREEAKPYPLFPGPFPGSLQTDHTPLLSLPHASGYQPALMFSPTQPGRPHTGNVAIPQVTSVESKPLPPLAFKHTVGHIILSEHKGVKFNCSISVPNIYQDTTISWWKDGKELLGAHHAITQFYPDDEVTAIIASFSITSVQRSDNGSYICKMKINNEEIVSDPIYIEVQGLPHFTKQPESMNVTRNTAFNLTCQAVGPPEPVNIFWVQNSSRVNEQPEKSPSVLTVPGLTEMAVFSCEAHNDKGLTVSKGVQINIKAIPSPPTEVSIRNSTAHSILISWVPGFDGYSPFRNCSIQVKEADPLSNGSVMIFNTSALPHLYQIKQLQALANYSIGVSCMNEIGWSAVSPWILASTTEGAPSVAPLNVTVFLNESSDNVDIRWMKPPTKQQDGELVGYRISHVWQSAGISKELLEEVGQNGSRARISVQVHNATCTVRIAAVTRGGVGPFSDPVKIFIPAHGWVDYAPSSTPAPGNADPVLIIFGCFCGFILIGLILYISLAIRKRVQETKFGNAFTEEDSELVVNYIAKKSFCRRAIELTLHSLGVSEELQNKLEDVVIDRNLLILGKILGEGEFGSVMEGNLKQEDGTSLKVAVKTMKLDNSSQREIEEFLSEAACMKDFSHPNVIRLLGVCIEMSSQGIPKPMVILPFMKYGDLHTYLLYSRLETGPKHIPLQTLLKFMVDIALGMEYLSNRNFLHRDLAARNCMLRDDMTVCVADFGLSKKIYSGDYYRQGRIAKMPVKWIAIESLADRVYTSKSDVWAFGVTMWEIATRGMTPYPGVQNHEMYDYLLHGHRLKQPEDCLDELYEIMYSCWRTDPLDRPTFSVLRLQLEKLLESLPDVRNQADVIYVNTQLLESSEGLAQGSTLAPLDLNIDPDSIIASCTPRAAISVVTAEVHDSKPHEGRYILNGGSEEWEDLTSAPSAAVTAEKNSVLPGERLVRNGVSWSHSSMLPLGSSLPDELLFADDSSEGSEVLM

SEQ ID NO: 144 - protein, 619 aa, Homo sapiens
MAAVVQQNDLVFEFASNVMEDERQLGDPAIFPAVIVEHVPGADILNSYAGLACVEEPNDMITESSLDVAEEEIIDDDDDDITLTVEASCHDGDETIETIEAAEALLNMDSPGPMLDEKRINNNIFSSPEDDMVVAPVTHVSVTLDGIPEVMETQQVQEKYADSPGASSPEQPKRKKGRKTKPPRPDSPATTPNISVKKKNKDGKGNTIYLWEFLLALLQDKATCPKYIKWTQREKGIFKLVDSKAVSRLWGKHKNKPDMNYETMGRALRYYYQRGILAKVEGQRLVYQFKEMPKDLIYINDEDPSSSIESSDPSLSSSATSNRNQTSRSRVSSSPGVKGGATTVLKPGNSKAAKPKDPVEVAQPSEVLRTVQPTQSPYPTQLFRTVHVVQPVQAVPEGEAARTSTMQDETLNSSVQSIRTIQAPTQVPVVVSPRNQQLHTVTLQTVPLTTVIASTDPSAGTGSQKFILQAIPSSQPMTVLKENVMLQSQKAGSPPSIVLGPAQVQQVLTSNVQTICNGTVSVASSPSFSATAPVVTFSPRSSQLVAHPPGTVITSVIKTQETKTLTQEVEKKESEDHLKENTEKTEQQPQPYVMVVSSSNGFTSQVAMKQNELLEPNSF

SEQ ID NO: 145 - protein, 433 aa, Homo sapiens
RELVLTQTGQCGNQIGAKFWEVISDEHAIDSAGTYHGDSHLQLERINVHHHEASGGRYVSRAVLVDLEPGTMDSVRSGPFGQVFRPDNFISRQCGAGNNWAKGRYTEGAELTESVMDVVRKEAESCDCLQGFQLTHSLGGGTGSGMGTLLISKIWEEYPDRIINTLSILLLPKVSDTVVEPYNATLSVHQLIENADETFCIDNEALYDICSRTLKLPTPTYGDLNHLVSATMSGVTTCLCFPDQLNADLRKLAMNMVPFPRLHFFMPGFAPLTSRGSQQYRALTVAELTQQMFDAKNMMAARDPRHGRYLTAAAIFQGRMPMREVDEQMFNIQDKNSSYFADWFPNNVKTAVCDIPPWGLKMSVTFTGNNTAVQELKRVSEQFTATFRRKAFLHWYTGEGMDEMEFTEAESNMNDLVSEYQQYQDATAEGGGV

SEQ ID NO: 146 - protein, 254 aa, Homo sapiens
MAAYKLVLIRHGESAWNLENRFSGWYDADLSPAGHEEAKRGGQALRDAGYEFDICFTSVQKRAIRTLWTVLDAIDQMWLPVVRTWRLNERHYGGLTGLNKAETAAKHGEAQVKIWRRSYDVPPPPMEPDHPFYSNISKDRRYADLTEDQLPSCESLKDTIARALPFWNEEIVPQIKEGKRVLIAAHGNSLRGIVKHLEGLSEEAIMELNLPTGIPIVYELDKNLKPIKPMQFLGDEETVRKAMEAVAAQGKAKK

SEQ ID NO: 147 - protein, 862 aa, Homo sapiens
MERAESSSTEPAKAIKPIDRKSVHQICSGQVVLSLSTAVKELVENSLDAGATNIDLKLKDYGVDLIEVSDNGCGVEEENFEGLTLKHHTSKIQEFADLTQVETFGFRGEALSSLCALSDVTISTCHASAKVGTRLMFDHNGKIIQKTPYPRPRGTTVSVQQLFSTLPVRHKEFQRNIKKEYAKMVQVLHAYCIISAGIRVSCTNQLGQGKRQPVVCTGGSPSIKENIGSVFGQKQLQSLIPFVQLPPSDSVCEEYGLSCSDALHNLFYISGFISQCTHGVGRSSTDRQFFFINRRPCDPAKVCRLVNEVYHMYNRHQYPFVVLNISVDSECVDINVTPDKRQILLQEEKLLLAVLKTSLIGMFDSDVNKLNVSQQPLLDVEGNLIKMHAADLEKPMVEKQDQSPSLRTGEEKKDVSISRLREAFSLRHTTENKPHSPKTPEPRRSPLGQKRGMLSSSTSGAISDKGVLRPQKEAVSSSHGPSDPTDRAEVEKDSGHGSTSVDSEGFSIPDTGSHCSSEYAASSPGDRGSQEHVDSQEKAPKTDDSFSDVDCHSNQEDTGCKFRVLPQPTNLATPNTKRFKKEEILSSSDICQKLVNTQDMSASQVDVAVKINKKVVPLDFSMSSLAKRIKQLHHEAQQSEGEQNYRKFRAKICPGENQAAEDELRKEISKTMFAEMEIIGQFNLGFIITKLNEDIFIVDQHATDEKYNFEMLQQHTVLQGQRLIAPQTLNLTAVNEAVLIENLEIFRKNGFDFVIDENAPVTERAKLISLPTSKNWTFGPQDVDELIFMLSDSPGVMCRPSRVKQMFASRACRKSVMIGTALNTSEMKKLITHMGEMDHPWNCPHGRPTMRHIANLGVISQN

SEQ ID NO: 148 - protein, 560 aa, Homo sapiens
MSEHSRNSDQEELLDEEINEDEILANLSAEELKELQSEMEVMAPDPSLPVGMIQKDQTDKPPTGNFNHKSLVDYMYWEKASRRMLEEERVPVTFVKSEEKTQEEHEEIEKRNKNMAQYLKEKLNNEIVANKRESKGSSNIQETDEEDEEEEDDDDDDEGEDDGEESEETNREEEGKAKEQIRNCENNCQQVTDKAFKEQRDRPEAQEQSEKKISKLDPKKLALDTSFLKVSTRPSGNQTDLDGSLRRVRKNDPDMKELNLNNIENIPKEMLLDFVNAMKKNKHIKTFSLANVGADENVAFALANMLRENRSITTLNIESNFITGKGIVAIMRCLQFNETLTELRFHNQRHMLGHHAEMEIARLLKANNTLLKMGYHFELPGPRMVVTNLLTRNQDKQRQKRQEEQKQQQLKEQKKLIAMLENGLGLPPGMWELLGGPKPDSRMQEFFQPPPPRPPNPQNVPFSQRSEMMKKPSQAPKYRTDPDSFRVVKLKRIQRKSRMPEAREPPEKTNLKDVIKTLKPVPRNRPPPLVEITPRDQLLNDIRHSSVAYLKPVTLPIELN

SEQ ID NO: 149 - protein, 423 aa, Homo sapiens
MSSQVVGIEPLYIKAEPASPDSPKGSSETETEPPVALAPGPAPTRCLPGHKEEEDGEGAGPGEQGGGKLVLSSLPKRLCLVCGDVASGYHYGVASCEACKAFFKRTIQGSIEYSCPASNECEITKRRRKACQACRFTKCLRVGMLKEGVRLDRVRGGRQKYKRRPEVDPLPFPGPFPAGPLAVAGGPRKTAAPVNALVSHLLVVEPEKLYAMPDPAGPDGHLPAVATLCDLFDREIVVTISWAKSIPGFSSLSLSDQMSVLQSVWMEVLVLGVAQRSLPLQDELAFAEDLVLDEEGARAAGLGELGAALLQLVRRLQALRLEREEYVLLKALALANSDSVHIEDAEAVEQLREALHEALLEYEAGRAGPGGGAERRRAGRLLLTLPLLRQTAGKVLAHFYGVKLEGKVPMHKLFLEMLEAMMD

SEQ ID NO: 150 - protein, 231 aa, Homo sapiens
MLHASTIWHLRSTPPRRKQWGHCDPHRILVASEVTTEITSPTPAPRAQVCGGQPWVTVLDPLSGHTGREAERHFATVSISAVELKYCHGWRPAGQRVPSKTATGQRTCAKPCQKPSTSKVILRAVADKGTCKYVSLATLKKAVSTTGYDMARNAYHFKRVLKGLVDKGSAGSFTLGKKQASKSKLKVKRQRQQRWRSGQRPFGQHRSLLGSKQGHKRLIKGVRRVAKCHCN

SEQ ID NO: 151 - protein, 477 aa, Homo sapiens
MAQRYDELPHYGGMDGVGVPASMYGDPHAPRPIPPVHHLNHGPPLHATQHYGAHAPHPNVMPASMGSAVNDALKRDKDAIYGHPLFPLLALVFEKCELATCTPREPGVAGGDVCSSDSFNEDIAVFAKQVRAEKPLFSSNPELDNLMIQAIQVLRFHLLELEKVHELCDNFCHRYISCLKGKMPIDLVIDERDGSSKSDHEELSGSSTNLADHNPSSWRDHDDATSTHSAGTPGPSSGGHASQSGDNSSEQGDGLDNSVASPGTGDDDDPDKDKKRQKKRGIFPKVATNIMRAWLFQHLTHPYPSEEQKKQLAQDTGLTILQVNNWFINARRRIVQPMIDQSNRAGFLLDPSVSQGAAYSPEGQPMGSFVLDGQQHMGIRPAGLQSMPGDYVSQGGPMGMSMAQPSYTPPQMTPHPTQLRHGPPMHSYLPSHPHHPAMMMHGGPPTHPGMTMSAQSPTMLNSVDPNVGGQVMDIHAQ

SEQ ID NO: 152 - protein, 369 aa, Homo sapiens
MFCVTPPELETKMNITKGGLVLFSANSNSSCMELSKKIAERLGVEMGKVQVYQEPNRETRVQIQESVRGKDVFIIQTVSKDVNTTIMELLIMVYACKTSCAKSIIGVIPYFPYSKQCKMRKRGSIVSKLLASMMCKAGLTHLITMDLHQKEIQGFFNIPVDNLRASPFLLQYIQEEIPDYRNAVIVAKSPASAKRAQSFAERLRLGIAVIHGEAQDAESDLVDGRHSPPMVRSVAAIHPSLEIPMLIPKEKPPITVVGDVGGRIAIIVDDIIDDVDSFLAAAETLKERGAYKIFVMATHGLLSSDAPRRIEESAIDEVVVTNTIPHEVQKLQCPKIKTVDISMILSEAIRRIHNGESMSYLFRNIGLDD

SEQ ID NO: 153 - protein, 785 aa, Homo sapiens
MTSLEPCRLFIYGKTERMKAYLKSAEGFFVLNKSTTIGRHENSDLVLQSPDIDNHHALIEYNEAECSFVLQDFNSRNGTFVNECHIQNVAVKLIPGDILRFGSAGLTYELVIENPPPVSFPWMRGPAPWPGPQPPRATQQPNQAPPPSHIPFHQGVQPAPMQRSWSQAFPRPTVVLPASHRRPVSANKEMFSFVVDDARKPPVIKQVWTNAMKLSEKSVAEGIPGAVPPAEIYVEEDLAQQDKDEIILLLGKEVSRLSDYEIESKYKDVIIANLQNEVAELSQKVSETTTSRQNEKEISQKCQVLDEDIDAKQKEIQSLKSQISALQKGYSKVLCQTLSERNSEITSLKNEGENLKRDNAITSGMVSSLQKDILAKDEQVQQLKEEVSHLKSQNKDKDHQLEALGSRCSVLKEELKQEDAHRELREAQEKELKLCKTQIQDMEKEMKKLRAELRKSCTEQSVISRTLREKSKVEEKLQEDSRRKLLQLQEMGNRESVIKINLERAVGQLEHFRSQVIKATYGRAKPFRDKPVTDQQLIEKITQVTEDNINFQQKKWTLQKETQLSNSKQEETTENIEKLRTSLDSCQACMKISCCSHDLKKEVDLLQHLQVSPPVSGLQKVVLDVLRHALSWLEEVEQLLRDLGILPSSPNKDQVQQFSGNSAVFTAGKAAGASGREGEAERGEARARGEAQSQNQATDGREGGKALEEYITQERNRAKETLEEERKRMQELESLLAQQKKALAKSITQEKNRVKEALEEEQTRVQELEERLARQKEVLESSIAH

SEQ ID NO: 154 - protein, 234 aa, Homo sapiens
MGGCVGAQHDSSGSLNENSEGTGVALGRNQPLKKEKPKWKSDYPMTDGQLRSKRDEFWDTAPAFEGRKEIWDALKAAAHAFESNDHELAQAIIDGANITLPHGALTECYDELGNRYQLPVYCLAPPINMIEEKSDIETLDIPEPPPNSGYECQLRLRLSTGKDLKLVVRSTDTVFHMKRRLHAAEGVEPGSQRWFFSGRPLTDKMKFEELKIPKDYVVQVIVSQPVQNPTPVEN

SEQ ID NO: 155 - protein, 490 aa, Homo sapiens
MEQKPSKVECGSDPEENSARSPDGKRKRKNGQCSLKTSMSGYIPSYLDKDEQCVVCGDKATGYHYRCITCEGCKGFFRRTIQKNLHPTYSCKYDSCCVIDKITRNQCQLCRFKKCIAVGMAMDLVLDDSKRVAKRKLIEQNRERRRKEEMIRSLQQRPEPTPEEWDLIHIATEAHRSTNAQGSHWKQRRKFLPDDIGQSPIVSMPDGDKVDLEAFSEFTKIITPAITRVVDFAKKLPMFSELPCEDQIILLKGCCMEIMSLRAAVRYDPESDTLTLSGEMAVKREQLKNGGLGVVSDAIFELGKSLSAFNLDDTEVALLQAVLLMSTDRSGLLCVDKIEKSQEAYLLAFEHYVNHRKHNIPHFWPKLLMKEREVQSSILYKGAAAEGRPGGSLGVHPEGQQLLGMHVVQGPQVRQLEQQLGEAGSLQGPVLQHQSPKSPQQRLLELLHRSGILHARAVCGEDDSSEADSPSSSEEEPEVCEDLAGNAASP

SEQ ID NO: 156 - protein, 376 aa, Homo sapiens
MFNPHALDVPAVIFDNGSGLCKAGLSGEIGPRHVISSVLGHCKFNVPLARLNQKYFVGQEALYKYEALHLHYPIERGLVTGWDDMEKLWKHLFERELGVKPSQQPVLMTEPSLNPREIREKLAEMMFETFSVPGFYLSNHAVAALYASACVTGLVVDSGDGVTCTVPIFEGYSLPHAVTKLCMAGRDITEHLTRLLFASGFNFPCILNKAVVNNIKEKLCYIALEPEKELRKSRGEVLGAYRLPDGHVIHFGDELYQVPEVLFAPDQLGIHSPGLSKMVSSSIMKCDTDIQNKLYADIVLSGGTTLLPGLEERLMKEVEQLASKGTPIKITASPDRCFSAWIGASIMTSMSSFKQMWVTSADFKEYGTSVVQRRCF

SEQ ID NO: 157 - protein, 238 aa, Homo sapiens
MLLQPAPCAPSAGFPRPLAPGAMHGSQKDTTFTKIFVGGLPYHTTDASLRKYFEGFGDIEEAVVITDRQTGKSRGYGFVTMADRAAAERACKDPNPIIDGRKANVNLAYLGAKPRSLQTGFAIGVQQLHPTLIQRTYGLTPHYIYPPAIVQPSVVIPAAPVPSLSSPYIEYTPASPAYAQYPPATYDQYPYAASPATAASFVGYSYPAAVPQALSAAAPAGTTFVQYQAPQLQPDRMQ

SEQ ID NO: 158 - protein, 211 aa, Homo sapiens
MAVVPLLLLGGLWSAVGASSLGVVTCGSVVKLLNTRHNVRLHSHDVRYGSGSGQQSVTGVTSVDDSNSYWRIRGKSATVCERGTPIKCGQPIRLTHVNTGRNLHSHHFTSPLSGNQEVSAFGEEGEGDYLDDWTVLCNGPYWVRDGEVRFKHSSTEVLLSVTGEQYGRPISGQKEVHGMAQPSQNNYWKAMEGIFMKPSELLKAEAHHAEL

SEQ ID NO: 159 - protein, 436 aa, Homo sapiens
MPMSSLPAAILSHMTAINNVPPPPLHSIPNLKKSKHINYGQLNALCHIRGQHSRSMSNILSAHDTFMKQYPKVFLHQKPRLPKLFKQEEQRELNEGKEESQHQQPDDSNNIAVHVQRAHGGHILYRPKRATEKFEEFLAILKKLPIHRTPYEHKTVWKFLKTIPDLTFQLNDKHLKTLSKTVFSETWLKGSTVVANDGFYVILKGLARPQTNVYKNLIEGSDSPDSFISQSFHSFIWSEEFKNSTLAEMYLPSYDSMLSKWSTFGTLEVMPQNESETQMFSVVTEDDCEILKIPAKGYAKIKEEKIKLENMQKLKLIRMCPYYEEWPTLSIYELIALLKWKKFPPGHVIVESGNIISFVGYINSGCCNIYRSIIGFVKLRSNKVKRSQKLVYMGKLKEKESFGEISVLLQVPFTCTIITKKEVEMAIIEDKDLFDA

SEQ ID NO: 160 - protein, 689 aa, Homo sapiens
MIEMAAEKEPFLVPAPPPPLKDESGGGGGPTVPPHQEAASGELRGGTERGPGRCAPSAGSPAAAVGRESPGAAATSSSGPQAQQHRGGGPQAQSHGEARLSDPPGRAAPPDVGEERRGGGGTELGPPAPPRPRNGYQPHRPPGGGGGKRRNSCNVGGGGGGFKHPAFKRRRRVNSDCDSVLPSNFLLGGNIFDPLNLNSLLDEEVSRTLNAETPKSSPLPAKGRDPVEILIPKDITDPLSLNTCTDEGHVVLASPLKTGRKRHRHRGQHHQQQQAAGGSESHPVPPTAPLTPLLHGEGASQQPRHRGQNRDAPQPYELNTAINCRDEVVSPLPSALQGPSGSLSAPPAASVISAPPSSSSRHRKRRRTSSKSEAGARGGGQGSKEKGRGSWGGRHHHHHPLPAAGFKKQQRKFQYGNYCKYYGYRNPSCEDGRLRVLKPEWFRGRDVLDLGCNVGHLTLSIACKWGPSRMVGLDIDSRLIHSARQNIRHYLSEELRLPPQTLEGDPGAEGEEGTTTVRKRSCFPASLTASRGPIAAPQVPLDGADTSVFPNNVVFVTGNYVLDRDDLVEAQTPEYDVVLCLSLTKWVHLNWGDEGLKRMFRRIYRHLRPGGILVLEPQPWSSYGKRKTLTETIYKNYYRIQLKPEQFSSYLTSPDVGFSSYELVATPHNTSKGFQRPVYLFHKARSPSH

SEQ ID NO: 161 - protein, 261 aa, Homo sapiens
MAGPELLLDSNIRLWVVLPIVIITFFVGMIRHYVSILLQSDKKLTQEQVSDSQVLIRSRVLRENGKYIPKQSFLTRKYYFNNPEDGFFKKTKRKVVPPSPMTDPTMLTDMMKGNVTNVLPMILIGGWINMTFSGFVTTKVPFPLTLRFKPMLQQGIELLTLDASWVSSASWYFLNVFGLRSIYSLILGQDNAADQSRMMQEQMTGAAMAMPADTNKAFKTEWEALELTDHQWALDDVEEELMAKDLHFEGMFKKELQTSIF

SEQ ID NO: 162 - protein, 780 aa, Homo sapiens
MEQVEILRKFIQRVQAMKSPDHNGEDNFARDFMRLRRLSTKYRTEKIYPTATGEKEENVKKNRYKDILPFDHSRVKLTLKTPSQDSDYINANFIKGVYGPKAYVATQGPLANTVIDFWRMIWEYNVVIIVMACREFEMGRKKCERYWPLYGEDPITFAPFKISCEDEQARTDYFIRTLLLEFQNESRRLYQFHYVNWPDHDVPSSFDSILDMISLMRKYQEHEDVPICIHCSAGCGRTGAICAIDYTWNLLKAGKIPEEFNVFNLIQEMRTQRHSAVQTKEQYELVHRAIAQLFEKQLQLYEIHGAQKIADGVNEINTENMVSSIEPEKQDSPPPKPPRTRSCLVEGDAKEEILQPPEPHPVPPILTPSPPSAFPTVTTVWQDNDRYHPKPVLHMVSSEQHSADLNRNYSKSTELPGKNESTIEQIDKKLERNLSFEIKKVPLQEGPKSFDGNTLLNRGHAIKIKSASPCIADKISKPQELSSDLNVGDTSQNSCVDCSVTQSNKVSVTPPEESQNSDTPPRPDRLPLDEKGHVTWSFHGPENAIPIPDLSEGNSSDINYQTRKTVSLTPSPTTQVETPDLVDHDNTSPLFRTPLSFTNPLHSDDSDSDERNSDGAVTQNKTNISTASATVSAATSTESISTRKVLPMSIARHNIAGTTHSGAEKDVDVSEDSPPPLPERTPESFVLASEHNTPVRSEWSELQSQERSEQKKSEGLITSENEKCDHPAGGIHYEMCIECPPTFSDKREQISENPTEATDIGFGNRCGKPKGPRDPPSEWT

SEQ ID NO: 163 - protein, 145 aa, Homo sapiens
MAVSTGVKVPRNFRLLEELEEGQKGVGDGTVSWGLEDDEDMTLTRWTGMIIGPPRTNYENRIYSLKVECGPKYPEAPPSVRFVTKINMNGINNSSGMVDARSIPVLAKWQNSYSIKVVLQELRRLMMSKENMKLPQPPEGQTYNN

SEQ ID NO: 164 - protein, 698 aa, Homo sapiens
MQDDLLMDKSKTQPQPQQQQRQQQQPQPESSVSEAPSTPLSSETPKPEENSAVPALSPAAAPPAPNGPDKMQMESPLLPGLSFHQPPQQPPPPQEPAAPGASLSPSFGSTWSTGTTNAVEDSFFQGITPVNGTMLFQNFPHHVNPVFGGTFSPQIGLAQTQHHQQPPPPAPAPQPAQPAQPPQAQPPQQRRSPASPSQAPYAQRSAAAAYGHQPIMTSKPSSSSAVAAAAAAAAASSASSSWNTHQSVNAAWSAPSNPWGGLQAGRDPRRAVGVGVGVGVGVPSPLNPISPLKKPFSSNVIAPPKFPRAAPLTSKSWMEDNAFRTDNGNNLLPFQDRSRPYDTFNLHSLENSLMDMIRTDHEPLKGKHYPPSGPPMSFADIMWRNHFAGRMGINFHHPGTDNIMALNNAFLDDSHGDQALSSGLSSPTRCQNGERVERYSRKVFVGGLPPDIDEDEITASFRRFGPLVVDWPHKAESKSYFPPKGYAFLLFQEESSVQALIDACLEEDGKLYLCVSSPTIKDKPVQIRPWNLSDSDFVMDGSQPLDPRKTIFVGGVPRPLRAVELAMIMDRLYGGVCYAGIDTDPELKYPKGAGRVAFSNQQSYIAAISARFVQLQHNDIDKRVEVKPYVLDDQMCDECQGTRCGGKFAPFFCANVTCLQYYCEYCWASIHSRAGREFHKPLVKEGGDRPRHVPFRWS

SEQ ID NO: 165 - protein, 60 aa, Homo sapiens
MSGRGKGGKGLGKGGAKRHRKVLRDNIQGITKPAIRRLARRGGVKRISGLIYEETRGVLK

SEQ ID NO: 166 - protein, 567 aa, Homo sapiens
MSQGSPGDWAPLDPTPGPPASPNPFVHELHLSRLQRVKFCLLGALLAPIRVLLAFIVLFLLWPFAWLQVAGLSEEQLQEPITGWRKTVCHNGVLGLSRLLFFLLGFLRIRVRGQRASRLQAPVLVAAPHSTFFDPIVLLPCDLPKVVSRAENLSVPVIGALLRFNQAILVSRHDPASRRRVVEEVRRRATSGGKWPQVLFFPEGTCSNKKALLKFKPGAFIAGVPVQPVLIRYPNSLDTTSWAWRGPGVLKVLWLTASQPCSIVDVEFLPVYHPSPEESRDPTLYANNVQRVMAQALGIPATECEFVGSLPVIVVGRLKVALEPQLWELGKVLRKAGLSAGYVDAGAEPGRSRMISQEEFARQLQLSDPQTVAGAFGYFQQDTKGLVDFRDVALALAALDGGRSLEELTRLAFELFAEEQAEGPNRLLYKDGFSTILHLLLGSPHPAATALHAELCQAGSSQGLSLCQFQNFSLHDPLYGKLFSTYLRPPHTSRGTSQTPNASSPGNPTALANGTVQAPKQKGDVFLENVIRDAVTYTEHAKRKTVTAMDVVYALKRQGRTLYGFGG

SEQ ID NO: 167 - protein, 2031 aa, Homo sapiens
MTHLNSLDVQLAQELGDFTDDDLDVVFTPKECRTLQPSLPEEGVELDPHVRDCVQTYIREWLIVNRKNQGSPEICGFKKTGSRKDFHKTLPKQTFESETLECSEPAAQAGPRHLNVLCDVSGKGPVTACDFDLRSLQPDKRLENLLQQVSAEDFEKQNEEARRTNRQAELFALYPSVDEEDAVEIRPVPECPKEHLGNRILVKLLTLKFEIEIEPLFASIALYDVKERKKISENFHCDLNSDQFKGFLRAHTPSVAASSQARSAVFSVTYPSSDIYLVVKIEKVLQQGEIGDCAEPYTVIKESDGGKSKEKIEKLKLQAESFCQRLGKYRMPFAWAPISLSSFFNVSTLEREVTDVDSVVGRSSVGERRTLAQSRRLSERALSLEENGVGSNFKTSTLSVSSFFKQEGDRLSDEDLFKFLADYKRSSSLQRRVKSIPGLLRLEISTAPEIINCCLTPEMLPVKPFPENRTRPHKEILEFPTREVYVPHTVYRNLLYVYPQRLNFVNKLASARNITIKIQFMCGEDASNAMPVIFGKSSGPEFLQEVYTAVTYHNKSPDFYEEVKIKLPAKLTVNHHLLFTFYHISCQQKQGASVETLLGYSWLPILLNERLQTGSYCLPVALEKLPPNYSMHSAEKVPLQNPPIKWAEGHKGVFNIEVQAVSSVHTQDNHLEKFFTLCHSLESQVTFPIRVLDQKISEMALEHELKLSIICLNSSRLEPLVLFLHLVLDKLFQLSVQPMVIAGQTANFSQFAFESVVAIANSLHNSKDLSKDQHGRNCLLASYVHYVFRLPEVQRDVPKSGAPTALLDPRSYHTYGRTSAAAVSSKLLQARVMSSSNPDLAGTHSAADEEVKNIMSSKIADRNCSRMSYYCSGSSDAPSSPAAPRPASKKHFHEELALQMVVSTGMVRETVFKYAWFFFELLVKSMAQHVHNMDKRDSFRRTRFSDRFMDDITTIVNVVTSEIAALLVKPQKENEQAEKMNISLAFFLYDLLSLMDRGFVFNLIRHYCSQLSAKLSNLPTLISMRLEFLRILCSHEHYLNLNLFFMNADTAPTSPCPSISSQNSSSCSSFQDQKIASMFDLTSEYRQQHFLTGLLFTELAAALDAEGEGISKVQRKAVSAIHSLLSSHDLDPRCVKPEVKVKIAALYLPLVGIILDALPQLCDFTVADTRRYRTSGSDEEQEGAGAINQNVALAIAGNNFNLKTSGIVLSSLPYKQYNMLNADTTRNLMICFLWIMKNADQSLIRKWIADLPSTQLNRILDLLFICVLCFEYKGKQSSDKVSTQVLQKSRDVKARLEEALLRGEGARGEMMRRRAPGNDRFPGLNENLRWKKEQTHWRQANEKLDKTKAELDQEALISGNLATEAHLIILDMQENIIQASSALDCKDSLLGGVLRVLVNSLNCDQSTTYLTHCFATLRALIAKFGDLLFEEEVEQCFDLCHQVLHHCSSSMDVTRSQACATLYLLMRFSFGATSNFARVKMQVTMSLASLVGRAPDFNEEHLRRSLRTILAYSEEDTAMQMTPFPTQVEELLCNLNSILYDTVKMREFQEDPEMLMDLMYRIAKSYQASPDLRLTWLQNMAEKHTKKKCYTEAAMCLVHAAALVAEYLSMLEDHSYLPVGSVSFQNISSNVLEESVVSEDTLSPDEDGVCAGQYFTESGLVGLLEQAAELFSTGGLYETVNEVYKLVIPILEAHREFRKLTLTHSKLQRAFDSIVNKDHKRMFGTYFRVGFFGSKFGDLDEQEFVYKEPAITKLPEISHRLEAFYGQCFGAEFVEVIKDSTPVDKTKLDPNKAYIQITFVEPYFDEYEMKDRVTYFEKNFNLRRFMYTTPFTLEGRPRGELHEQYRRNTVLTTMHAFPYIKTRISVIQKEEFVLTPIEVAIEDMKKKTLQLAVAINQEPPDAKMLQMVLQGSVGATVNQGPLEVAQVFLAEIPADPKLYRHHNKLRLCFKEFIMRCGEAVEKNKRLITADQREYQQELKKNYNKLKENLRPMIERKIPELYKPIFRVESQKRDSFHRSSFRKCETQLSQGS

SEQ ID NO: 168 - protein, 852 aa, Homo sapiens
MSGRARVKARGIARSPSATEVGRIQASPLPRSVDLSNNEASSSNGFLGTSRISTNDKYGISSGDAGSTFMERGVKNKQDFMDLSICTREKLAHVRNCKTGSSGIPVKLVTNLFNLDFPQDWQLYQYHVTYIPDLASRRLRIALLYSHSELSNKAKAFDGAILFLSQKLEEKVTELSSETQRGETIKMTITLKRELPSSSPVCIQVFNIIFRKILKKLSMYQIGRNFYNPSEPMEIPQHKLSLWPGFAISVSYFERKLLFSADVSYKVLRNETVLEFMTALCQRTGLSCFTQTCEKQLIGLIVLTRYNNRTYSIDDIDWSVKPTHTFQKRDGTEITYVDYYKQQYDITVSDLNQPMLVSLLKKKRNDNSEAQLAHLIPELCFLTGLTDQATSDFQLMKAVAEKTRLSPSGRQQRLARLVDNIQRNTNARFELETWGLHFGSQISLTGRIVPSEKILMQDHICQPVSAADWSKDIRTCKILNAQSLNTWLILCSDRTEYVAESFLNCLRRVAGSMGFNVDYPKIIKVQENPAAFVRAIQQYVDPDVQLVMCILPSNQKTYYDSIKKYLSSDCPVPSQCVLARTLNKQGMMMSIATKIAMQMTCKLGGELWAVEIPLKSLMVVGIDVCKDALSKDVMVVGCVASVNPRITRWFSRCILQRTMTDVADCLKVFMTGALNKWYKYNHDLPARIIVYRAGVGDGQLKTLIEYEVPQLLSSVAESSSNTSSRLSVIVVRKKCMPRFFTEMNRTVQNPPLGTVVDSEATRNEWYDFYLISQVACRGTVSPTYYNVIYDDNGLKPDHMQRLTFKLCHLYYNWPGIVSVPAPCQYAHKLTFLVAQSIHKEPSLELANHLFYL

SEQ ID NO: 169 - protein, 245 aa, Homo sapiens
KPKMLTRKIKLWDINAHITCRLCSGYLIDATTVTECLHTFCRSCLVKYLEENNTCPTCRIVIHQSHPLQYIGHDRTMQDIVYKLVPGLQEAEMRKQREFYHKLGMEVPGDIKGETCSAKQHLDSHRNGETKADDSSNKEAAEEKPEEDNDYHRSDEQVSICLECNSSKLRGLKRKWIRCSAQATVLHLKKFIAKKLNLSSFNELDILCNEEILGKDHTLKFVVVTRWRFKKAPLLLHYRPKMDLL

SEQ ID NO: 170 - protein, 508 aa, Homo sapiens
MQRLLTPVKRILQLTRAVQETSLTPARLLPVAHQRFSTASAVPLAKTDTWPKDVGILALEVYFPAQYVDQTDLEKYNNVEAGKYTVGLGQTRMGFCSVQEDINSLCLTVVQRLMERIQLPWDSVGRLEVGTETIIDKSKAVKTVLMELFQDSGNTDIEGIDTTNACYGGTASLFNAANWMESSSWDGRYAMVVCGDIAVYPSGNARPTGGAGAVAMLIGPKAPLALERGLRGTHMENVYDFYKPNLASEYPIVDGKLSIQCYLRALDRCYTSYRKKIQNQWKQAGSDRPFTLDDLQYMIFHTPFCKMVQKSLARLMFNDFLSASSDTQTSLYKGLEAFGGLKLEDTYTNKDLDKALLKASQDMFDKKTKASLYLSTHNGNMYTSSLYGCLASLLSHHSAQELAGSRIGAFSYGSGLAASFFSFRVSQDAAPGSPLDKLVSSTSDLPKRLASRKCVSPEEFTEIMNQREQFYHKVNFSPPGDTNSLFPGTWYLERVDEQHRRKYARRPV

SEQ ID NO: 171 - protein, 3477 aa, Homo sapiens
MANRRVGRGCWEVSPTERRPPAGLRGPAAEEEASSPPVLSLSHFCRSPFLCFGDVLLGASRTLSLALDNPNEEVAEVKISHFPAADLGFSVSQRCFVLQPKEKIVISVNWTPLKEGRVREIMTFLVNDVLKHQAILLGNAEEQKKKKRSLWDTIKKKKISASTSHNRRVSNIQNVNKTFSVSQKVDRVRSPLQACENLAMNEGGPPTENNSLILEENKIPISPISPAFNECHGATCLPLSVRRSTTYSSLHASENRELLNVHSANVSKVSFNEKAVTETSFNSVNVNGQRGENSKLSLTPNCSSTLNITQSQIHFLSPDSFVNNSHGANNELELVTCLSSDMFMKDNSQPVHLESTIAHEIYQKILSPDSFIKDNYGLNQDLESESVNPILSPNQFLKDNMAYMCTSQQTCKVPLSNENSQVPQSPEDWRKSEVSPRIPECQGSKSPKAIFEELVEMKSNYYSFIKQNNPKFSAVQDISSHSHNKQPKRRPILSATVTKRKATCTRENQTEINKPKAKRCLNSAVGEHEKVINNQKEKEDFHSYLPIIDPILSKSKSYKNEVTPSSTTASVARKRKSDGSMEDANVRVAITEHTEVREIKRIHFSPSEPKTSAVKKTKNVTTPISKRISNREKLNLKKKTDLSIFRTPISKTNKRTKPIIAVAQSSLTFIKPLKTDIPRHPMPFAAKNMFYDERWKEKQEQGFTWWLNFILTPDDFTVKTNISEVNAATLLLGIENQHKISVPRAPTKEEMSLRAYTARCRLNRLRRAACRLFTSEKMVKAIKKLEIEIEARRLIVRKDRHLWKDVGERQKVLNWLLSYNPLWLRIGLETTYGELISLEDNSDVTGLAMFILNRLLWNPDIAAEYRHPTVPHLYRDGHEEALSKFTLKKLLLLVCFLDYAKISRLIDHDPCLFCKDAEFKASKEILLAFSRDFLSGEGDLSRHLGLLGLPVNHVQTPFDEFDFAVTNLAVDLQCGVRLVRTMELLTQNWDLSKKLRIPAISRLQKMHNVDIVLQVLKSRGIELSDEHGNTILSKDIVDRHREKTLRLLWKIAFAFQVDISLNLDQLKEEIAFLKHTKSIKKTISLLSCHSDDLINKKKGKRDSGSFEQYSENIKLLMDWVNAVCAFYNKKVENFTVSFSDGRVLCYLIHHYHPCYVPFDAICQRTTQTVECTQTGSVVLNSSSESDDSSLDMSLKAFDHENTSELYKELLENEKKNFHLVRSAVRDLGGIPAMINHSDMSNTIPDEKVVITYLSFLCARLLDLRKEIRAARLIQTTWRKYKLKTDLKRHQEREKAARIIQLAVINFLAKQRLRKRVNAALVIQKYWRRVLAQRKLLMLKKEKLEKVQNKAASLIQGYWRRYSTRQRFLKLKYYSIILQSRIRMIIAVTSYKRYLWATVTIQRHWRAYLRRKQDQQRYEMLKSSTLIIQSMFRKWKQRKMQSQVKATVILQRAFREWHLRKQAKEENSAIIIQSWYRMHKELRKYIYIRSCVVIIQKRFRCFQAQKLYKRRKESILTIQKYYKAYLKGKIERTNYLQKRAAAIQLQAAFRRLKAHNLCRQIRAACVIQSYWRMRQDRVRFLNLKKTIIKFQAHVRKHQQRQKYKKMKKAAVIIQTHFRAYIFAMKVLASYQKTRSAVIVLQSAYRGMQARKMYIHILTSVIKIQSYYRAYVSKKEFLSLKNATIKLQSTVKMKQTRKQYLHLRAAALFIQQCYRSKKIAAQKREEYMQMRESCIKLQAFVRGYLVRKQMRLQRKAVISLQSYFRMRKARQYYLKMYKAIIVIQNYYHAYKAQVNQRKNFLQVKKAATCLQAAYRGYKVRQLIKQQSIAALKIQSAFRGYNKRVKYQSVLQSIIKIQRWYRAYKTLHDTRTHFLKTKAAVISLQSAYRGWKVRKQIRREHQAALKIQSAFRMAKAQKQFRLFKTAALVIQQNFRAWTAGRKQCMEYIELRHAVLVLQSMWKGKTLRRQLQRQHKCAIIIQSYYRMHVQQKKWKIMKKAALLIQKYYRAYSIGREQNHLYLKTKAAVVTLQSAYRGMKVRKRIKDCNKAAVTIQSKYRAYKTKKKYATYRASAIIIQRWYRGIKITNHQHKEYLNLKKTAIKIQSVYRGIRVRRHIQHMHRAATFIKAMFKMHQSRISYHTMRKAAIVIQVRCRAYYQGKMQREKYLTILKAVKVLQASFRGVRVRRTLRKMQTAATLIQSNYRRYRQQTYFNKLKKITKTVQQRYWAMKERNIQFQRYNKLRHSVIYIQAIFRGKKARRHLKMMHIAATLIQRRFRTLMMRRRFLSLKKTAILIQRKYRAHLCTKHHLQFLQVQNAVIKIQSSYRRWMIRKRMREMHRAATFIQSTFRMHRLHMRYQALKQASVVIQQQYQANRAAKLQRQHYLRQRHSAVILQAAFRGMKTRRHLKSMHSSATLIQSRFRSLLVRRRFISLKKATIFVQRKYRATICAKHKLYQFLHLRKAAITIQSSYRRLMVKKKLQEMQRAAVLIQATFRMYRTYITFQTWKHASILIQQHYRTYRAAKLQRENYIRQWHSAVVIQAAYKGMKARQLLREKHKASIVIQSTYRMYRQYCFYQKLQWATKIIQEKYRANKKKQKVFQHNELKKETCVQAGFQDMNIKKQIQEQHQAAIIIQKHCKAFKIRKHYLHLRATVVSIQRRYRKLTAVRTQAVICIQSYYRGFKVRKDIQNMHRAATLIQSFYRMHRAKVDYETKKTAIVVIQNYYRLYVRVKTERKNFLAVQKSVRTIQAAFRGMKVRQKLKNVSEEKMAAIVNQSALCCYRSKTQYEAVQSEGVMIQEWYKASGLACSQEAEYHSQSRAAVTIQKAFCRMVTRKLETQKCAALRIQFFLQMAVYRRRFVQQKRAAITLQHYFRTWQTRKQFLLYRKAAVVLQNHYRAFLSAKHQRQVYLQIRSSVIIIQARSKGFIQKRKFQEIKNSTIKIQAMWRRYRAKKYLCKVKAACKIQAWYRCWRAHKEYLAILKAVKIIQGCFYTKLERTRFLNVRASAIIIQRKWRAILPAKIAHEHFLMIKRHRAACLIQAHYRGYKGRQVFLRQKSAALIIQKYIRAREAGKHERIKYIEFKKSTVILQALVRGWLVRKRFLEQRAKIRLLHFTAAAYYHLNAVRIQRAYKLYLAVKNANKQVNSVICIQRWFRARLQEKRFIQKYHSIKKIEHEGQECLSQRNRAASVIQKAVRHFLLRKKQEKFTSGIIKIQALWRGYSWRKKNDCTKIKAIRLSLQVVNREIREENKLYKRTALALHYLLTYKHLSAILEALKHLEVVTRLSPLCCENMAQSGAISKIFVLIRSCNRSIPCMEVIRYAVQVLLNVSKYEKTTSAVYDVENCIDILLELLQIYREKPGNKVADKGGSIFTKTCCLLAILLKTTNRASDVRSRSKVVDRIYSLYKLTAHKHKMNTERILYKQKKNSSISIPFIPETPVRTRIVSRLKPDWVLRRDNMEEITNPLQAIQMVMDTLGIPY

SEQ ID NO: 172 - protein, 606 aa, Homo sapiens
MPYEIKKVFASLPQVERGVSKIIGGDPKGNNFLYTNGKCVILRNIDNPALADIYTEHAHQVVVAKYAPSGFYIASGDVSGKLRIWDTTQKEHLLKYEYQPFAGKIKDIAWTEDSKRIAVVGEGREKFGAVFLWDSGSSVGEITGHNKVINSVDIKQSRPYRLATGSDDNCAAFFEGPPFKFKFTIGDHSRFVNCVRFSPDGNRFATASADGQIYIYDGKTGEKVCALGGSKAHDGGIYAISWSPDSTHLLSASGDKTSKIWDVSVNSVVSTFPMGSTVLDQQLGCLWQKDHLLSVSLSGYINYLDRNNPSKPLHVIKGHSKSIQCLTVHKNGGKSYIYSGSHDGHINYWDSETGENDSFAGKGHTNQVSRMTVDESGQLISCSMDDTVRYTSLMLRDYSGQGVVKLDVQPKCVAVGPGGYAVVVCIGQIVLLKDQRKCFSIDNPGYEPEVVAVHPGGDTVAIGGVDGNVRLYSILGTTLKDEGKLLEAKGPVTDVAYSHDGAFLAVCDASKVVTVFSVADGYSENNVFYGHHAKIVCLAWSPDNEHFASGGMDMMVYVWTLSDPETRVKIQDAHRLHHVSSLAWLDEHTLVTTSHDASVKEWTITY

SEQ ID NO: 173 - protein, 528 aa, Homo sapiens
MAGSDTAPFLSQADDPDDGPVPGTPGLPGSTGNPKSEEPEVPDQEGLQRITGLSPGRSALIVAVLCYINLLNYMDRFTVAGVLPDIEQFFNIGDSSSGLIQTVFISSYMVLAPVFGYLGDRYNRKYLMCGGIAFWSLVTLGSSFIPGEHFWLLLLTRGLVGVGEASYSTIAPTLIADLFVADQRSRMLSIFYFAIPVGSGLGYIAGSKVKDMAGDWHWALRVTPGLGVVAVLLLFLVVREPPRGAVERHSDLPPLNPTSWWADLRALARNPSFVLSSLGFTAVAFVTGSLALWAPAFLLRSRVVLGETPPCLPGDSCSSSDSLIFGLITCLTGVLGVGLGVEISRRLRHSNPRADPLVCATGLLGSAPFLFLSLACARGSIVATYIFIFIGETLLSMNWAIVADILLYVVIPTRRSTAEAFQIVLSHLLGDAGSPYLIGLISDRLRRNWPPSFLSEFRALQFSLMLCAFVGALGGAAFLGTAIFIEADRRRAQLHVQGLLHEAGSTDDRIVVPQRGRSTRVPVASVLI

SEQ ID NO: 174 - protein, 414 aa, Homo sapiens
MAALRYAGLDDTDSEDELPPGWEERTTKDGWVYYANHTEEKTQWEHPKTGKRKRVAGDLPYGWEQETDENGQVFFVDHINKRTTYLDPRLAFTVDDNPTKPTTRQRYDGSTTAMEILQGRDFTGKVVVVTGANSGIGFETAKSFALHGAHVILACRNMARASEAVSRILEEWHKAKVEAMTLDLALLRSVQHFAEAFKAKNVPLHVLVCNAATFALPWSLTKDGLETTFQVNHLGHFYLVQLLQDVLCRSAPARVIVVSSESHRFTDINDSLGKLDFSRLSPTKNDYWAMLAYNRSKLCNILFSNELHRRLSPRGVTSNAVHPGNMMYSNIHRSWWVYTLLFTLARPFTKSMQQGAATTVYCAAVPELEGLGGMYFNNCCRCMPSPEAQSEETARTLWALSERLIQERLGSQSG

SEQ ID NO: 175 - protein, 503 aa, Homo sapiens
MALIPDLAMETWLLLAVSLVLLYLYGTHSHGLFKKLGIPGPTPLPFLGNILSYHKGFCMFDMECHKKYGKVWGFYDGQQPVLAITDPDMIKTVLVKECYSVFTNRRPFGPVGFMKSAISIAEDEEWKRLRSLLSPTFTSGKLKEMVPIIAQYGDVLVRNLRREAETGKPVTLKDVFGAYSMDVITSTSFGVNIDSLNNPQDPFVENTKKLLRFDFLDPFFLSITVFPFLIPILEVLNICVFPREVTNFLRKSVKRMKESRLEDTQKHRVDFLQLMIDSQNSKETESHKALSDLELVAQSIIFIFAGYETTSSVLSFIMYELATHPDVQQKLQEEIDAVLPNKAPPTYDTVLQMEYLDMVVNETLRLFPIAMRLERVCKKDVEINGMFIPKGVVVMIPSYALHRDPKYWTEPEKFLPERFSKKNKDNIDPYIYTPFGSGPRNCIGMRFALMNMKLALIRVLQNFSFKPCKETQIPLKLSLGGLLQPEKPVVLKVESRDGTVSGA

SEQ ID NO: 176 - protein, 631 aa, Homo sapiens
MAAHLVKRCTCLLREAARQAPAMAPVGRLRLAWVAHKTLTSSATSPISHLPGSLMEPVEKERASTPYIEKQVDHLIKKATRPEELLELLGGSHDLDSNQAAMVLIRLSHLLSEKPEDKGLLIQDAHFHQLLCLLNSQIASVWHGTLSKLLGSLYALGIPKASKELQSVEQEVRWRMRKLKYKHLAFLAESCATLSQEQHSQELLAELLTHLERRWTEIEDSHTLVTVMMKVGHLSEPLMNRLEDKCLELVEHFGPNELRKVLVMLAAQSRRSVPLLRAISYHLVQKPFSLTKDVLLDVAYAYGKLSFHQTQVSQRLATDLLSLMPSLTSGEVAHCAKSFALLKWLSLPLFEAFAQHVLNRAQDITLPHLCSVLLAFARLNFHPDQEDQFFSLVHEKLGSELPGLEPALQVDLVWALCVLQQAREAELQAVLHPEFHIQFLGGKSQKDQNTFQKLLHINATALLEYPEYSGPLLPASAVAPGPSALDRKVTPLQKELQETLKGLLGSADKGSLEVATQYGWVLDAEVLLDSDGEFLPVRDFVAPHLAQPTGSQSPPPGSKRLAFLRWEFPNFNSRSKDLLGRFVLARRHIVAAGFLIVDVPFYEWLELKSEWQKGAYLKDKMRKAVAEELAK

SEQ ID NO: 177 - protein, 111 aa, Homo sapiens
MGPSSCLLLILIPLLQLINPGSTQCSLDSVMDKKIKDVLNSLEYSPSPISKKLSCASVKSQGRPSSCPAGMAVTGCACGYGCGSWDVQLETTCHCQCSVVDWTTARCCHLT

SEQ ID NO: 178 - protein, 475 aa, Homo sapiens
MADMQNLVERLERAVGRLEAVSHTSDMHRGYADSPSKAGAAPYVQAFDSLLAGPVAEYLKISKEIGGDVQKHAEMVHTGLKLERALLVTASQCQQPAENKLSDLLAPISEQIKEVITFREKNRGSKLFNHLSAVSESIQALGWVAMAPKPGPYVKEMNDAAMFYTNRVLKEYKDVDKKHVDWVKAYLSIWTELQAYIKEFHTTGLAWSKTGPVAKELSGLPSGPSAGSCPPPPPPCPPPPPVSTISCSYESASRSSLFAQINQGESITHALKHVSDDMKTHKNPALKAQSGPVRSGPKPFSAPKPQTSPSPKRATKKEPAVLELEGKKWRVENQENVSNLVIEDTELKQVAYIYKCVNTTLQIKGKINSITVDNCKKLGLVFDDVVGIVEIINSKDVKVQVMGKVPTISINKTDGCHAYLSKNSLDCEIVSAKSSEMNVLIPTEGGDFNEFPVPEQFKTLWNGQKLVTTVTEIAG

SEQ ID NO: 179 - protein, 890 aa, Homo sapiens
MNYVGQLAGQVFVTVKELYKGLNPATLSGCIDIIVIRQPNGNLQCSPFHVRFGKMGVLRSREKVVDIEINGESVDLHMKLGDNGEAFFVQETDNDQEVIPMHLATSPILSEGASRMECQLKRGSVDRMRGLDPSTPAQVIAPSETPSSSSVVKKRRKRRRKSQLDSLKRDDNMNTSEDEDMFPIEMSSDEAMELLESSRTLPNDIPPFQDDIPEENLSLAVIYPQSASYPNSDREWSPTPSPSGSRPSTPKSDSELVSKSTERTGQKNPEMLWLWGELPQAAKSSSPHKMKESSPLSSRKICDKSHFQAIHSESSDTFSDQSPTLVGGALLDQNKPQTEMQFVNEEDLETLGAAAPLLPMIEELKPPSASVVQTANKTDSPSRKRDKRSRHLGADGVYLDDLTDMDPEVAALYFPKNGDPSGLAKHASDNGARSANQSPQSVGSSGVDSGVESTSDGLRDLPSIAISLCGGLSDHREITKDAFLEQAVSYQQFVDNPAIIDDPNLVVKIGSKYYNWTTAAPLLLAMQAFQKPLPKATVESIMRDKMPKKGGRWWFSWRGRNTTIKEESKPEQCLAGKAHSTGEQPPQLSLATRVKHESSSSDEERAAAKPSNAGHLPLLPNVSYKKTLRLTSEQLKSLKLKNGPNDVVFSVTTQYQGTCRCEGTIYLWNWDDKVIISDIDGTITRSDTLGHILPTLGKDWTHQGIAKLYHKVSQNGYKFLYCSARAIGMADMTRGYLHWVNERGTVLPQGPLLLSPSSLFSALHREVIEKKPEKFKVQCLTDIKNLFFPNTEPFYAAFGNRPADVYSYKQVGVSLNRIFTVNPKGELVQEHAKTNISSYVRLCEVVDHVFPLLKRSHSSDFPCSDTFSNFTFWREPLPPFENQDIHSASA

SEQ ID NO: 180 - protein, 639 aa, Homo sapiens
MSRSPDAKEDPVECPLCMEPLEIDDINFFPCTCGYQICRFCWHRIRTDENGLCPACRKPYPEDPAVYKPLSQEELQRIKNEKKQKQNERKQKISENRKHLASVRVVQKNLVFVVGLSQRLADPEVLKRPEYFGKFGKIHKVVINNSTSYAGSQGPSASAYVTYIRSEDALRAIQCVNNVVVDGRTLKASLGTTKYCSYFLKNMQCPKPDCMYLHELGDEAASFTKEEMQAGKHQEYEQKLLQELYKLNPNFLQLSTGSVDKNKNKVTPLQSPIDKPSDSLSIGNGDNSQQISNSDTPSPPPGLSKSNPVIPISSSNHSARSPFEGAVTESQSLFSDNFRHPNPIPSGLPPFPSSPQTSSDWPTAPEPQSLFTSETIPVSSSTDWQAAFGFGSSKQPEDDLGFDPFDVTRKALADLIEKELSVQDQPSLSPTSLQNSSSHTTTAKGPGSGFLHPAAATNANSLNSTFSVLPQRFPQFQQHRAVYNSFSFPGQAARYPWMAFPRNSIMHLNHTANPTSNSNFLDLNLPPQHNTGLGGIPVAGIPASSGNSLDSLQDDNPPHWLKSLQALTEMDGPSAAPSQTHHSAPFSTQIPLHRASWNPYPPPSNPSSFHSPPPGFQTAFRPPSKTPTDLLQSSTLDRH

SEQ ID NO: 181 - protein, 341 aa, Homo sapiens
MADEKPSNGVLVHMVKLLIKTFLDGIFDDLMENNVLNTDEIHLIGKCLKFVVSNAENLVDDITETAQIAGKIFREHLWNSKKQLSSDISSDGEREANMPGLNIRNKEFNYLHNRNGSELDLLGMRDLLENLGYSVVIKENLTAQEMETALRQFAAHPEHQSSDSTFLVFMSHSILNGICGTKHWDQEPDVLHDDTIFEIFNNRNCQSLKDKPKVIIMQACRGNGAGIVWFTTDSGKASADTHGRLLQGNICNDAVTKAHVEKDFIAFKSSTPHNVSWRHETNGSVFISQIIYYFREYSWSHHLEEIFQKVQHSFETPNILTQLPTIERLSMTRYFYLFPGN

SEQ ID NO: 182 - protein, 366 aa, Homo sapiens
MAAARHSTLDFMLGAKADGETILKGLQSIFQEQGMAESVHTWQDHGYLATYTNKNGSFANLRIYPHGLVLLDLQSYDGDAQGKEEIDSILNKVEERMKELSQDSTGRVKRLPPIVRGGAIDRYWPTADGRLVEYDIDEVVYDEDSPYQNIKILHSKQFGNILILSGDVNLAESDLAYTRAIMGSGKEDYTGKDVLILGGGDGGILCEIVKLKPKMVTMVEIDQMVIDGCKKYMRKTCGDVLDNLKGDCYQVLIEDCIPVLKRYAKEGREFDYVINDLTAVPISTSPEEDSTWEFLRLILDLSMKVLKQDGKYFTQGNCVNLTEALSLYEEQLGRLYCPVEFSKEIVCVPSYLELWVFYTVWKKAKP

SEQ ID NO: 183 - DNA, 2351 bp, Homo sapiens
cgggtctgatagtccctacctgtcaggactggtgttaggatgagataatgtttgtgaactgtaaactatataaacgtgtgctactgtgagaactggacaaagaagagagggagtgagagaaattaagggagggctggggctgggaaagaacgaaaagggagtcgcgtatagaggagagcgcgacagtcgcgagccacactttgcaatgaaactctttagactttctgccgggagagcggcccagacgcgccaggtctgtagcaggaggccgcgccgagggcgggtccccagaagcctacaggtgagtatcggttctccccttcccggctttcggtccggaggaggcgggagcagcttccctgttctgatcctatcgcgggcggcgcagggccggcttggccttccgtgggacggggaggggggcgggatgtgtcacccaaataccagtggggacggtcggtggtggaaccagccgggcaggtcgggtagagtataagagccggagggagcggccgggcggcagacgcctgcagaccatcccagacgccggagcccgagccccgacgagtccccgcgcctcatccgcccgcgtccggtccgcgttcctccgccccaccatggctcggggccccggcctcgcgccgccaccgctgcggctgccgctgctgctgctggtgctggcggcggtgaccggccacacggccgcgcaggacaactgcacgtgtcccaccaacaagatgaccgtgtgcagccccgacggccccggcggccgctgccagtgccgcgcgctgggctcgggcatggcggtcgactgctccacgctgacctccaagtgtctgctgctcaaggcgcgcatgagcgcccccaagaacgcccgcacgctggtgcggccgagtgagcacgcgctcgtggacaacgatggcctctacgaccccgactgcgaccccgagggccgcttcaaggcgcgccagtgcaaccagacgtcggtgtgctggtgcgtgaactcggtgggcgtgcgccgcacggacaagggcgacctgagcctacgctgcgatgagctggtgcgcacccaccacatcctcattgacctgcgccaccgccccaccgccggcgccttcaaccactcagacctggacgccgagctgaggcggctcttccgcgagcgctatcggctgcaccccaagttcgtggcggccgtgcactacgagcagcccaccatccagatcgagctgcggcagaacacgtctcagaaggccgccggtgacgtggatatcggcgatgccgcctactacttcgagagggacatcaagggcgagtctctattccagggccgcggcggcctggacttgcgcgtgcgcggagaacccctgcaggtggagcgcacgctcatctattacctggacgagattcccccgaagttctccatgaagcgcctcaccgccggcctcatcgccgtcatcgtggtggtcgtggtggccctcgtcgccggcatggccgtcctggtgatcaccaaccggagaaagtcggggaagtacaagaaggtggagatcaaggaactgggggagttgagaaaggaaccgagcttgtaggtacccggcggggcaggggatggggtggggtaccggatttcggtatcgtcccagacccaagtgagtcacgcttcctgattcctcggcgcaaaggagacgtttatcctttcaaattcctgccttccccctcccttttgcgcacacaccaggtttaatagatcctggcctcagggtctcctttctttctcacttctgtcttgaaggaagcatttctaaaatgtatcccctttcggtccaacaacaggaaacctgactggggcagtgaaggaagggatggcatagcgttatgtgtaaaaaacaagtatctgtatgacaacccgggatcgtttgcaagtaactgaatccattgcgacattgtgaaggcttaaatgagtttagatgggaaatagcgttgttatcgccttgggtttaaattatttgatgagttccacttgtatcatggcctacccgaggagaagaggagtttgttaactgggcctatgtagtagcctcatttaccatcgtttgtattactgaccacatatgcttgtcactgggaaagaagcctgtttcagctgcctgaacgcagtttggatgtctttgaggacagacattgcccggaaactcagtctatttattcttcagcttgcccttactgccactgatattggtaatgttcttttttgtaaaatgtttgtacatatgttgtctttgataatgttgctgtaattttttaaaataaaacacgaatttaataaaatatgggaaaggcacaaaccagaa

SEQ ID NO: 184 - DNA, 6834 bp, Homo sapiens
gccaggccgcgtccgccatagtacctggcttggaggtgtcgccgccgctcggtgagagcccccgagcggcagggggccaacacaaaaagggagccggagaagccctagccgctgcccagcagcttgcgggcgtgttctcgcggttccgggcctcaaggcgacggaaacgaaaggcgagcgaagcgcggaggatccggcgagaagaagcgtcagggagcctcggcggtgtccccggggtccgccgaagccacccggccgccggctggggcccggggtggtgaggaagtgctccgaggcctcgccgaggcctagcgccggctttgtgtccgaggcggcggcggcggcggggggaggcggagccgggggcggcctgcgggaaggcctctcctccgccgaccgcgcgttttcggcctaggccgtggggccgctcgtggcctccggggagcaggcgccaggggtttgtgtgcggtgggggcctgggcctgggcctggggaagctgacgccggtcgtccggaagccaggaggaggcgtgaggccgctcgtggactccgggcctaggccctctcccctcaaccttctcccggggcctgggtcaccccaatccacggagagagagacccgccgggaggtgcggccgcgctatggacccctgaccccgtggggtcgctcggactcttaacgtgtggactgaccgctactgactgcaccgccaatccccccgtctctgccggccccttagcatgagcgagggggacccagccgggtgacattgtgcccgttggcggattctcgatttcccctcttccccgtcctcgtcctcctcctcccccatgaagtgattctgagtatcggggggtctctggattattgttctgacgaacccctgcttgtggttggggggtatttaatctgaggccttagggtccttcggtgtctttgagtgttttgtgtgtacatattttgctcttaaagtttataaatatacgtatattgagagtgtccacgtctcctcgctgaaccttaggaatcccttggcaccatgtcctgtgtgcattataaattttcctctaaactcaactatgataccgtcacctttgatgggctccacatctccctctgcgacttaaagaagcagattatggggagagagaagctgaaagctgccgactgcgacctgcagatcaccaatgcgcagacgaaagaagaatatactgatgataatgctctgattcctaagaattcttctgtaattgttagaagaattcctattggaggtgttaaatctacaagcaagacatatgttataagtcgaactgaaccagcgatggcaactacaaaagcaattgatgactcttccgcgtctatttctctggcccagcttacaaagactgccaatctggctgaagccaatgcttctgaagaagataaaattaaagcaatgatgtcgcaatctggccatgaatacgacccaatcaattacatgaagaaacctctaggtccaccacctccatcttacacgtgtttccgttgtggtaaacctggacattatattaagaattgcccaacaaatggggataaaaactttgaatctggtcctaggattaaaaagagcactggaattcccagaagtttcatgatggaagtgaaagatcctaatatgaaaggtgcaatgcttaccaacactggaaaatatgcaataccaactatagatgcagaagcatatgcaattgggaagaaagagaaacctcccttcttaccagaggagccatcttcttcctcagaagaagatgatcctatcccagatgaattgttgtgtctcatctgcaaggatattatgactgatgctgttgtgattccctgctgtggaaacagttactgtgatgaatgtataagaacagcactcctggaatcagatgagcacacatgtccgacgtgtcatcaaaatgatgtttctcctgatgctttaattgccaataaatttttacgacaggctgtaaataacttcaaaaatgaaactggctatacaaaaagactacgaaaacagttacctcctccaccacccccaataccacctccgagaccactgattcagaggaacctacaacctctgatgagatctccgatatcaagacaacaagatcctcttatgattccagtgacatcttcatcaactcacccagctccgtctatatcttcattaacttctaatcagtcttccttggcccctcctgtgtctggaaatccgtcttctgctccagctcctgtacctgatataactgcaacagtatccatatcagttcattcagaaaaatcagatggaccttttcgggattctgataataaaatattgccagctgcagctcttgcatcagagcactcaaagggaacctcctcaattgcaattaccgctcttatggaagagaagggttaccaggtgcctgttcttggaaccccatctttgcttggacagtcattattgcatggacagttgatccccacaactggtccagtaagaataaatactgctcgtccaggtggtggtcgaccaggctgggaacattccaacaaacttggctatctggtttctccaccacaacaaattagaagaggggagaggagctgctacagaagtataaaccgtgggcgacaccacagcgaaagatcacagaggactcaaggcccgtcactaccagcaactccagtctttgtacctgttccaccacctcctttgtatccgcctcctccccatacacttcctctccctccgggtgttcctcctccacagttttctcctcagtttcctcctggccagccaccacccgctgggtatagtgtccctcctccagggtttcctccagctcctgccaatttatcaacaccttgggtatcatcaggagtgcagacagctcattcaaataccatcccaacaacacaagcaccacctttgtccagggaagaattctatagagagcagcgacgactaaaagaagaggaaaagaaaaagtccaagctagatgagtttacaaatgattttgctaaggaattgatggaatacaaaaagattcaaaaggagcgtaggcgctcattttccaggtctaaatctccctatagtggttcttcgtattcaagaagttcatatacttattctaaatcaagatctggttcaacacgttcacgctcttattctcgatcattcagccgctcacattctcgttcctattcacggtcacctccataccccagaagaggcagaggcaagagccgcaattaccgttcacggtctagatctcatggatatcatcgatctaggtcaaggtcacccccttacagacgctatcattcacgatcaagatctcctcaagcgtttaggggacagtctcctaataaacgtaatgtacctcaaggggaaacagaacgtgaatattttaatagatacagagaagttccaccaccatatgacatgaaagcatattatgggagaagtgttgactttagagacccatttgaaaaagaacgctaccgagaatgggagagaaaatatagagagtggtatgaaaaatattataaaggttatgctgctggagcacagcctagaccctcagcaaatagagagaacttttctccagagagatttttgccacttaacatcaggaattctcccttcacaagaggccgcagagaagactatgttggtgggcaaagtcatagaagtcgaaacataggtagcaactatccagaaaagctttcagcaagagatggtcacaatcagaaggataatacaaagtcaaaagagaaggagagtgaaaacgctccaggagatggtaaaggaaataagcataagaaacacagaaaaagaagaaaaggggaggaaagtgagggttttctgaacccagagttattagagacttctaggaaatcaagagaacctacaggtgttgaagaaaataaaacagactcattgtttgttctcccaagtagagatgatgccacacctgttagagatgaaccaatggatgcagaatcaatcacttttaaatcagtgtctgaaaaagacaagagagaaagggataaaccaaaagcaaagggtgataaaaccaaacggaagaatgatggatctgctgtgtccaaaaaagaaaatattgtaaaacctgctaaaggaccccaagaaaaagtagatggagaacgtgagagatctcctcgatctgaacctccaattaaaaaagccaaagaggagactccgaagactgacaatactaaatcatcatcttcctctcagaaggatgaaaaaatcactggaacccccagaaaagctcactctaaatcagcaaaagaacaccaagaaacaaaaccagtcaaagaggaaaaagtgaagaaggactattccaaagatgtcaaatcagaaaagctaacaactaaggaagaaaaggccaagaagcctaatgagaaaaacaaaccacttgataataagggagaaaaaagaaaaagaaaaactgaagaaaaaggcgtagataaagattttgagtcttcttcaatgaaaatctcgaaactagaagtgactgaaatagtgaaaccatcaccaaagcgcaaaatggaacctgatactgaaaaaatggataggacccctgaaaaggacaaaatttctttaagtgcgccagccaaaaaaatcaaactcaacagagaaactgggaagaaaattggaagtacagaaaatatatcaaacacaaaagaaccctctgaaaaattggagtcaacatctagcaaagttaaacaagaaaaagtcaaaggaaaggtcagacgaaaagtgactggaactgaaggatccagctcaactctggtggattacaccagtacgagctcaactggaggcagtcctgtgcggaaatctgaagaaaaaacagatacaaagcgaactgtgattaaaacgatggaagaatataataatgacaataccgcgccagctgaagatgttatcattatgattcaggttcctcaatccaaatgggataaagatgactttgaatctgaagaagaagatgttaaatccacacagcctatatcaagtgtaggaaaacctgctagtgttataaaaaatgttagtacaaagccatcaaatatagtcaagtatcctgagaaagaaagtgagccatccgagaaaattcagaaattcaccaaggacgtgagccatgaaatcatacaacatgaggttaaaagttcaaaaaactctgcatctagtgaaaaagggaaaaccaaagatcgagattattcagtgttggaaaaggagaaccctgaaaagaggaagaacagcactcagccagagaaagagagtaatttggaccgtctgaatgaacaaggaaattttaaaagtctgtctcaatcttccaaagaggctagaacgtcagataaacatgattccactcgtgcttcctcaaataaagacttcactcccaatagagacaaaaaaactgactatgacaccagagagtattcaagttccaaacgtagagatgaaaagaatgaattaacaagacgaaaagactctccttctcggaataaagattctgcatctggacagaaaaataaaccaagggaagagagagatttgcctaaaaaaggaacaggagattccaaaaaaagtaattctagtccctcaagagacagaaaacctcatgatcacaaagccacttatgatactaaacggccaaatgaagagacaaaatctgtagataaaaatccttgtaaggatcgtgagaagcatgtattagaagcaaggaacaataaagagtcaagtggcaataaactactttatatacttaacccaccagagacacaggttgaaaaagagcaaattactgggcaaattgacaagagtactgtcaagcctaaaccccagttaagtcattcctctagactttcctctgacttaactagagaaactgatgaagctgcttttgaaccagactataatgaaagtgacagtgaaagtaatgtttctgtaaaagaagaggaatcttcaggaaacatttctaaggacctgaaagataaaatagtggagaaagcaaaagagagcctggacacagcagcagttgtccaggtgggcataagcaggaatcagagccacagcagccccagcgtcagccccagcagaagccacagtccttctggaagccagacccgaagccacagtagcagtgccagctcagcagaaagtcaggacagcaagaagaagaagaaaaagaaggaaaagaaaaaacacaagaaacataaaaagcataagaagcataagaaacatgcaggcactgaagtggaattggaaaaaagccaaaaacacaaacacaagaaaaagaagtcaaagaagaacaaagataaagagaaggagaaggagaaagatgaccaaaaagtgaaatctgtcactgtgtaaaaagacagattttttaaattgacttaattactaagtcatctgtattaaattttgttataatgtaaagagattcaagccttgtaaataatgacatggaagaccctgtgctgcacttaaaatattgctgcttgattatttgatttttacatcagagctttataacacgaacttttgtacagaattgtgagttgtgaccatgtaacatgagaggttttgctagggcctattatttttaaccaccattaattagttggggtggagtttactgtaatgtgaaattttcacatttgaattttttaattgcctggcaaaagctgatataagttctaaaatatcagcagaatgatttgctgaattcattacaaccctgttatgtcactttttgattacaataaaagttttcagtaaacttttc

SEQ ID NO: 185 - DNA, 1986 bp, Homo sapiens
aggcggagggggcggggcttcggccggctaagccgcggccacccgcggtctgagggaccggaggagcggggccgggagctgcgaggagccctccagacgtcgccgagcgcgagggcgggcgtgctcggagtggtcgctcgtcagccgccgcccctcagtctccgcacttgcaggtcccctccctctccgccgggacgcgggagagcccggctcgcggcgggggcggccaatgcgaaactggctggtgctgctgtgcccgtgtgtgctcggggccgcgctgcacctctggctgcggctgcgctccccgccgcccgcctgcgcctccggggccggccctgcagatcagttggccttatttcctcagtggaaatctactcactatgatgtggtagttggcgtgttgtcagctcgcaataaccatgaacttcgaaacgtgataagaagcacctggatgagacatttgctacagcatcccacattaagtcaacgtgtgcttgtgaagttcataataggtgctcatggctgtgaagtgcctgtggaagacagggaagatccttattcctgtaaactactcaacatcacaaatccagttttgaatcaggaaattgaagcgttcagtctgtccgaagacacttcatcggggctgcctgaggatcgagttgtcagcgtgagtttccgagttctctaccccatcgttattaccagtcttggagtgttctacgatgccaatgatgtgggtttccagaggaacatcactgtcaaactttatcaggcagaacaagaggaggccctcttcattgctcgcttcagtcctccaagctgtggtgtgcaggtgaacaagctgtggtacaagcccgtggaacaattcatcttaccagagagctttgaaggtacaatcgtgtgggagagccaagacctccacggccttgtgtcaagaaatctccacaaagtgacagtgaatgatggagggggagttctcagagtcattacagctggggagggtgcattgcctcatgaattcttggaaggtgtggagggagttgcaggtggttttatatatactattcaggaaggtgatgctctcttacacaaccttcattctcgccctcaaagacttattgatcatataaggaatctccatgaggaagatgccttactgaaggaggaaagcagcatctatgatgatattgtttttgtggatgttgtcgacacttatcgtaatgttcctgcaaaattattgaacttctatagatggactgtggaaacaacgagcttcaatttgttgctgaagacagatgatgactgttacatagacctcgaagctgtatttaataggattgtccaaaagaatctggatgggcctaatttttggtggggaaatttcagactgaattgggcagttgaccgaaccggaaagtggcaggagttggagtacccgagccccgcttaccctgcctttgcatgtgggtcaggatatgtgatctccaaggacatcgtcaagtggctggcaagcaactcggggaggttaaagacctatcagggtgaagatgtaagcatgggcatctggatggctgccataggacctaaaagataccaggacagtctgtggctgtgtgagaagacctgtgagacaggaatgctgtcttctcctcagtattctccgtgggaactgacggaactgtggaaactgaaggaacggtgcggtgatccttgtcgatgtcaagcaagataacagggacttgaattagcagagtctaaaatcagggcaggcaaacgataatctgagtgcaagtctgaggagtcccagggtttagcagtagactgtatggtctttcaagagagttccagactggcactttcacccagaaccaatgcggtgtttcttaatgtttgcacaaatttccttaaaaatcaacttgtactgtagcataagaaaagtttttatttatctattggaagattatcagaaaaataccaagttatttt

SEQ ID NO: 186 - DNA, 6593 bp, Homo sapiens
agtgtggaggcgggagcccgggcggccggcttgaactccgtgcacgcgggcctggagctgcgcccctgcgtcttttcccgacttctgatccgcagaggggcactcggagccccagcctgggtcgcagtgccttcggtctgcgggcctcagtttctcggtggcgcctggactctcgccctcagagggaggcccgtcccacggtctgtggctacggatcccaggaccctcttcgcgggcgattcgcgtagcctcagattgcctcggatgatggcctgcgactgacagtctctcagctcttctcagctctcctgaggctgcagctgtcagctccctgatcctcagcacttgcctggaccagtgcgggtctgccacgccctgttcagccatccctgtcctgttgtgtcgtgcaagccacatctgtccacacccccaccacccaccagtgctggctctcctctcttctcccctgtgctcccagcatgcctcgtggccggtgccgtcagcagggccctcgcattcccatctgggcagccgccaattatgccaacgcacatccatggcagcagatggacaaggcgtctcctggggtggcatacaccccccttgtggatccctggattgagcggccctgctgtggggacaccgtgtgtgtgcgaacgaccatggagcagaagagcacagctagtggcacttgtggcggtaaacctgcagaaaggggtcccctagctgggcacatgcccagctcccgaccccacagggtggacttctgctgggtaccaggctcagacccaggcacctttgatggctccccgtggctactggaccgcttcttggcccagctgggcgattacatgtccttccactttgagcactatcaggacaacatcagccgtgtctgcgagatcctcaggcgcctaacaggccgagcccaggcctgggcagccccctaccttgatggggacctgcccctgcctgacgattacgagctcttctgccaggatctcaaggaagttgttcaagacccgaacagttttgctgagtaccatgctgtggttacctgtcccctgcccctggcctccagccagctgccagtggcccctcagctgcctgtggtgaggcaatacttagctaggttcttagagggcctggcactcgacatgggtactgcccccaggtctttaccagccgccatggccacccctgctgtgtctgggtccaactctgtatctagaagtgctctgttcgagcagcagctgaccaaggagagcacccctgggcccaaggagcccccagtcctgcccagttctacatgtagctccaagcctggtcctgtggaaccagcctcttcccagccagaggaggcagcccccacacctgtccctagactgtcggagtcagctaatcctcctgcccagagaccagacccagctcatccaggaggtccaaaaccccagaaaacagaggaggaggttttggagacagagggagaccaggaggtgtccttaggtaccccacaggaggtggtggaggccccggagaccccaggagagccaccactttctcctgggttctgaacacagcccaggtgggaacaatgctgcccctcatgatgaagtggcctgtgtggcttgagcgccccatagtccccagtcagagcagagtggtgtccccagatgacttcagaccccatagctgggcaagatgcgcttgttttggactctgcgctgagcagaaccagctcccccaactccagcagagcttgacctccgccctgtgccctttccctgctgctggctctctgctgcatccctgcccgtcttctgggagtgccgtctcacccaggcctgctcccacgagggggtcgttttgtagatcaactctcagcagatagttgcatcatctttgtcacctccacccccataaaacaccccccttggtgtcttccacactggctgggactgaactgggtctgccacgtctgccctgttgggacctcgttcctgtatggggtttctgtgtctgtccccctagccccaccctctctgctccctgtgacttctgtcccagctggaatgtgaggaaggctgcctggaggaagtggccactttgattctgggggatgagtgggatagcatcttggcaaagaatgatgtttcctgtgggattaccagcagttctgggcagctggaaggtttggatgcaggaaggtgggatgcaagccccttgccaggctcagctgcaggcattcgccctttgtgtgttaacactgtagctctaatcgtgcctggtgttctgaagcaggctcctcttccctgctgctgtgctgccatcccctgctcactccgcactcgcatgcattgcggattcagcacttaagccctagtgtgtaaatgacttggatctccctcctggcagactgtgaccctcagcacaggggctctgtcttagtcagctctgtggcctggtacacaattggtgctcattaaacacgtgttggattactggctgaggtggtgcagtggctgcctaccagcaagtctttgtttcccattctgtcaggagcagaggcctggccatgagcattccaggtcagcattgcagctgtggtttctggcaggggctttgagggtccaagggtctgatcaaagaagctgggtggggctgagtagggggtgggtggctctgcaggtagagaactgacttccgagagctgtaggtgaagtgaggaccaggcagcagtccagagctgtgaggccccaggcccagaggaatggaatgaagaaagacctgttccacacaaggaggggttttctagtggaagctgagcttggaagctcctggagccaagtttaccacaggataggcaggtacagccgcccagtgtgtgcagtgtgtgcccactctggtgcttggacaagaagttcaagtccctttcaggtttacaattgtgaaaacaacaaaacaacaccttcctggaaagtaggaagaaaaagcagaaatgtgaattggaaatacagccaactattttaggaaaaactaattagcaagcatctgattaaacttattcagaaactggccgggagcagtgtctcacacctgtaatcccagcactctgggaggccaaggtgggtggatcacctgaggtcaggagttcaagaccagcctgaccagcatggagaaatccatctctcctaaaaatacaaaattagccaagtgtggtggtgcatgcctgtaatctcagctacttgggaggctgaggcagaagaattgcttgaacccaggaggcagagggtgtggtgagccgagatcacgccattgcactccagcctggacaacaagagtgaaactccatcccaaaaaaaaaaaaacaacaaaaaacaaaaaccttatttagaaaaatataaattgttgggattattttatggtaactatcactagaaaaggctctgggttcagatggttttatgtgtgagttatttcagggcacagataccttgtaggtaaaacaactggaaaccttggaaataggtgggaagctatttttagaaagcaggtatagccctggtagcaaagcaagtgagctggcagaagaaacccattttcagtcttgattctggtcagatgtgagaagtccctggatgtcctggcccagccccatgcttctgtgccaggtcacagctgccctccgtccgatgactcaggccccatccccccttttgtgggttgggtcagactgctccctgatgcctacctccagtgcactgtggcctggctcacctgtgggtctggcagtagaacccagagttgctctctaggatggacagcctagtcacccagctgacctttaccctgtcccacaggcttctggacaggccaccttccccatctccctttagtggacctgaagtggatactccagcctgggattgctgccttctcttttgaaccctgtcctattggggctttggggcttttgtgcccttgggacccaggcagctcctgggggtgtgtgagttatggtctgccgtgtgtctgagggccagtcatgcagcatccacctaggcaggcttgagagtccttgggagagtccaggtgacctggtttttaattaaaacgcgtcctgtttattgtggttgggctctgcccagaaaggaaggtagggccttgaagtggtgatgtccaggtttcctgcacaggtagggtggaggcaacgatggactctggcatggccttccagacaggcagtgcacacagctcctttcagagtggctttgttgccagctgctgcagcacctgctttcagacagatgatgaccaagctgctttcctgctgggggaaggaggcattccccctgggttgtttttctcttctggcccccacacactggcagacccgaaggcagggtgctcaggagctgcagagcctggcagggtttgctggacatgctcagggacgggccatggtgctggctctgctttctaatcatggtgtcagtccttcacttcccttggaaatacccagagattttatttcctgaagataggacatgatgggtgctgtgagatggtatttaaagtacctgtctgcaaggaaaactttaaaataggaagtactaaggataaggtcctatgggatattggaatattttataaagccacaatagttaaagcacttagatgtggacagatgagcagagaatagaggactttgaaacgggccaaataaatatggaaatttagtacaggctagaggtgtttccaattaacgagtaaaatggattattcagtaaaagcagttggccctctggaaaatagtaaagccatgtatgtgcctcactctttatgccagtacatattccagattaaagatttcaatgttacaattatgaaagtactagaggaaaatatgggtgaatttttttttttttttttttttgcctatgattccaggattttaaaagttttagatgcccagagttgtggaggtatggagaagtggaccttctcatactgttggtgggaatacacaataatataatttgaccacgtaacaattctaggcacatgcatgctgtgactacttgctaggtgcatgaaggctcttgccaggggtggtcatggttcggtaccactacatgggggtttagagcagggactggaggttggccttgcctcctcccctccccgcatgagctgagggtccttacctgacctttttgagctgtgaccagagtttttcctcatggggtggttagaagggttgaatgagaatgatgcccatgcagtgccttggctggggtctgggccctctaacacccacctcatgggtgtcactgttttttgaacagcagaactggaaaagcccaaagatccagcaataaaggagcaaggcaaataaagctgttaccctgcaggatcagtcagcatgagccagattgtgctgcagtaacaaagatctccaacagcgcagcggctacagttggcactgcttatttcttgcttgcacctgtgggccaccgtggctggggcctgtcagacctgtgctgacgacagcctacctggacatatttctccatgctcactgaggcaggggaaaggccacagcaggccacaagtaatgtgtgtcaccccacttccatttctgtggccaaaggaagccacagagccacacctgagttccataggacggcagcagctgatcatcctatgggctggggtgctcagtatggagaagtacaagcagccacccagcgtggggctggttggtgctgctgaggatgggaggatgggaggggcctgcatccatcccagggcaacatacctgtttgtctgctggggctgcctgacaaaggaccgcaggctaggggacttaaacaacagacatttcctcatgattctggagctagaagcctgagatcaaggtgtgggcagggttggtttctcctgaggcctcgctccttggcctgcagatagccatcttcttgccgtgtccctgtctgtgtctgtgtcctaatctctcataagctcactagtctattggatcagggcccaccctcatgacctcatttaaccctgaattacctctttaaagaccctgtcttcaaatgtaagtactaggggttaggacttgaacataaaaatattgaagggacatagttctgcccacagcggtgcccgcgataggcttctctggttttgtctttgctgttcctggcagcgctatattgggcaggcttctgtggtctccacatgcctgtgtgcagagtcccccaggccctgggttctggggcccatactgaggagtggggatggccaagccttggctgttgagtaggcagtgcccagttgtgctgtatgggatgctgtttctcacttaagaaatctttccctacctggggggtacaaaggcattatcctgtattcccaggttgtaactttctgcctttgacattcaaccttgagtccacctgtaagtgtaactgcggcagaagggaggggtctgctgtcatccttgatagcctgtgatgagcagagcccctctgccgaccgcgatgcacatgtaatatgagcaagaaataaatttttgatgtgcg

SEQ ID NO: 187 - DNA, 1503 bp, Homo sapiens
gttggcaagcggaccaccagcaacagacaacatcttcattcggctctccctgaagctgtactgcctcgctgagaggatgaaggtctccgaggctgccctgtctctccttgtcctcatccttatcattacttcggcttctcgcagccagccaaaagttcctgagtgggtgaacaccccatccacctgctgcctgaagtattatgagaaagtgttgccaaggagactagtggtgggatacagaaaggccctcaactgtcacctgccagcaatcatcttcgtcaccaagaggaaccgagaagtctgcaccaaccccaatgacgactgggtccaagagtacatcaaggatcccaacctacctttgctgcctaccaggaacttgtccacggttaaaattattacagcaaagaatggtcaaccccagctcctcaactcccagtgatgaccaggctttagtggaagcccttgtttacagaagagaggggtaaacctatgaaaacaggggaagccttattaggctgaaactagccagtcacattgagagaagcagaacaatgatcaaaataaaggagaagtatttcgaatattttctcaatcttaggaggaaataccaaagttaagggacgtgggcagaggtacgctcttttatttttatatttatatttttatttttttgagatagggtcttactctgtcacccaggctggagtgcagtggtgtgatcttggctcacttgatcttggctcactgtaacctccacctcccaggctcaagtgatcctcccaccccagcctcctgagtagctgggactacaggcttgcgccaccacacctggctaatttttgtatttttggtagagacgggattctaccatgttgcccaggctggtctcaaactcgtgtgcccaagcaatccacctgcctcagccttccaaaagtgctgggattacaggcgtgagccaccacatccggccagtgcactcttaatacacagaaaaatatatttcacatccttctcctgctctctttcaattcctcacttcacaccagtacacaagccattctaaatacttagccagtttccagccttccagatgatctttgccctctgggtcttgacccattaagagccccatagaactcttgatttttcctgtccatctttatggatttttctggatctatattttcttcaattattctttcattttataatgcaactttttcataggaagtccggatgggaatattcacattaatcatttttgcagagactttgctagatcctctcatattttgtcttcctcagggtggcaggggtacagagagtgcctgattggaaaaaaaaaaaaaagagagagagagagaagaagaagaagaagagacacaaatctctacctcccatgttaagctttgcaggacagggaaagaaagggtatgagacacggctaggggtaaactcttagtccaaaacccaagcatgcaataaataaaactcccttatttg

SEQ ID NO: 188 - DNA, 4289 bp, Homo sapiens
gctggccccgccccctagcgccgcggtcggagccatttcgccgattcctccatgcgagttgctgtgcgtttctctgttgtctcggtagaaggccagagtcacacacggtcctaagagctgggcaccaggaagcgaaggctgatctgaagaagacacttgaatcatgggtgacgttaaaaattttctgtatgcctggtgtggcaaaaggaagatgaccccatcctatgaaattagagcagtggggaacaaaaacaggcagaaattcatgtgtgaggttcaggtggaaggttataattacactggcatgggaaattccaccaataaaaaagatgcacaaagcaatgctgccagagactttgttaactatttggttcgaataaatgaaataaagagtgaagaagttccagcttttggggtagcatctccgcccccacttactgatactcctgacactacagcaaatgctgaaggagatttaccaacaaccatgggaggacctcttcctccacatctggctctcaaagcagaaaataattctgaggtaggggcctctggctatggtgttcctgggcccacctgggaccgaggagccaacttgaaggattactactcaagaaaggaagaacaagaagtgcaagcgactctagaatcagaagaagtggatttaaatgctgggcttcatggaaactggaccttggaaaatgctaaagctcgtctaaaccaatattttcagaaagaaaagatccaaggagaatataagtacacccaagtgggtcctgatcacaacaggagctttattgcagaaatgaccatttatatcaagcagctgggcagaaggatttttgcacgagaacatggatcaaataagaaattggcagcacagtcctgtgccctgtcacttgtcagacaactgtaccatcttggagtggttgaagcttactccggacttacaaagaagaaggaaggagagacagtggagccttacaaagtaaacctctctcaagatttagagcatcagctgcaaaacatcattcaagagctaaatcttgagattttgcccccgcctgaagatccttctgtgccagttgcactcaacattggcaaattggctcagttcgaaccatctcagcgacaaaaccaagtgggtgtggttccttggtcacctccacaatccaactggaatccttggactagtagcaacattgatgaggggcctctggcttttgctactccagagcaaataagcatggacctcaagaatgaattgatgtaccagttggaacaggatcatgatttgcaagcaatcttgcaggagagagagttactgcctgtgaagaaatttgaaagtgagattctggaagcaatcagccaaaattcagttgtcattattagaggggctactggatgtgggaaaaccacacaggttccccagttcattctagatgactttatccagaatgaccgagcagcagagtgtaacatcgtagtaactcagcccagaagaatcagtgcggtttctgtggcagagcgagttgcatttgaaagaggagaagagcctggaaaaagctgtggctacagcgttcgatttgagtctatacttcctcgtcctcatgccagtataatgttttgtactgtaggtgtgctcctgagaaaattagaagcaggcattcgaggaatcagtcatgtaattgtagatgaaatacatgaaagagatattaatactgacttccttttggtagtactgcgtgatgttgttcaggcttatcctgaagttcgcattgttcttatgtctgctactattgataccagcatgttttgtgaatatttcttcaattgccccatcattgaagtttatgggaggacttacccagttcaagaatattttctggaagactgcattcagatgacccactttgttcctccaccaaaagacaaaaagaagaaggataaggatgatgatggtggtgaggatgatgatgcaaattgcaacttgatctgtggtgatgaatatggtccagaaacaaggttgagcatgtctcaattgaacgaaaaggaaactccttttgaactcatcgaggctctacttaagtacattgaaacccttaatgttcctggagctgtgttggtttttttgcctggctggaatctgatttatactatgcagaagcatttggaaatgaatccacattttggaagccatcggtatcagattctacccctgcattctcagattcctcgagaggaacagcgcaaagtgtttgatccagtaccagttggagtaaccaaggttattttgtccacaaatattgctgaaacaagcattaccataaacgatgttgtttatgtcattgactcctgcaagcagaaagtgaaactcttcactgctcacaacaatatgaccaactatgctaccgtatgggcatcaaaaacaaaccttgagcaacggaaagggcgagctggccgagtacggcctggattctgctttcacctgtgcagccgagctcgttttgagagacttgaaacccacatgacaccagagatgttccgaacaccattgcatgaaattgctcttagcataaaacttctgcgtctaggaggaattggccaatttctggccaaagcaattgaacctccccctttggatgctgtgattgaagcagaacacactcttagagagcttgatgcattagatgccaatgatgagttgactcctttgggacgaatcctggctaaactccccattgagcctcgttttggcaaaatgatgataatggggtgtattttctacgtgggagatgctatctgtaccattgctgctgctacctgctttccagagcctttcatcaatgaaggaaagcggctgggctatatccatcgaaattttgctggaaacagattttctgatcacgtagcccttttatcagtattccaagcctgggatgatgctagaatgggtggagaagaagcagagatacgtttttgtgagcacaaaagacttaatatggctacactaagaatgacttgggaagccaaagttcagctcaaagagattttgattaattctgggtttccagaagattgtttgttgacacaagtgtttactaacactggaccagataataatttggatgttgttatctccctcctggcctttggtgtgtaccccaatgtatgctatcataaggaaaagaggaagattctcaccactgaagggcgtaatgcacttatccacaaatcatctgttaattgtccttttagtagccaagacatgaagtacccatctcccttctttgtatttggtgaaaagattcgaactcgagccatctctgctaaaggcatgactttagtcacccccctgcagttgcttctctttgcctccaagaaagtccaatctgatgggcagattgtgcttgtagatgactggattaaactgcaaatatctcatgaagctgctgcctgtatcactggtctccgggcagccatggaggctttggttgttgaagtaaccaaacaacctgctatcatcagccagttggaccccgtaaatgaacgtatgctgaacatgatccgtcagatctctagaccctcagctgctggtatcaaccttatgattggcagtacacggtatggagatggtccacgtcctcccaagatggcccgatacgacaatggaagcggatatagaaggggaggttctagttacagtggtggaggctatggcggtggctatagcagtggaggctatggtagcggaggctatggtggcagcgccaactcctttcgggcaggatatggtgcaggtgttggtggaggctatagaggagtttcccgaggtggctttagaggcaactctggaggagactacagagggcctagtggaggctacagaggatctgggggattccagcgaggaggtggtaggggggcctatggaactggctactttggacagggaagaggaggtggcggctattaaaacttggttatgtcagttcctgtgtgtagacagtaaggaaaaaaaggcatgctatgtgttacgtgttttttccagtatgtttatttgccaccaaaaagtaaatgcattttcacccattctgtggttcattgtagtttaaggaaaccaagcatatagatgcattagtgattttgtttatattatgtaaaatataacgatctcttaaaaataccacagtttgtattttttctttaaggagtaaagatttgcctttaaataacttggtattttcctggctttcgtttaatacaatagaaaataaagtattacaccg

SEQ ID NO: 189 - DNA, 2212 bp, Homo sapiens
ggcgcgctttcaaacgctcaggtttcctaccttccggctgcttgggaacttctttcttgcccgccaagcccgcagccacccgggcgcggcgggactcctagacccggcgctgcgatgaagaggacccgcgacgaggtggatgcgacgctgcagatcgccaagctgaatgcggccgagctgctgccggcggtgcactgcctgggcttcggccctggggccagcggcgctgcagccggcgacttctgcctgctggagctggagcccacgctgtgccagcagctggaggatggacacagtcttgtgattcgtggtgataaagacgagcaagctgtgctgtgcagtaaagacaaaacatacgacttgaagatagcagacacttccaatatgttgcttttcattcctggttgtaaaactccggaccagttgaagaaggaagattcacactgtaacattattcacactgagatctttggtttttctaataattattgggaattaagaagacgtagacccaagttaaagaagctaaagaaacttttgatggaaaatccatatgaaggacctgacagtcaaaaagagaaggattcaaatagctcaaaatatacaactgaagatttgcttgatcaaattcaggcaagtgaggaagaaataatgacccaattacaagttctaaatgcctgtaagattggaggttattggaggattcttgaatttgattatgagatgaaacttctgaatcatgtaactcagcttgtggattctgaatcatggtcttttggtaaagttcctttgaacacatgccttcaggaactcggaccattggagccagaggaaatgatagaacactgtcttaaatgttatgggaagaaatatgtagatgaaggcgaagtttattttgagttggatgctgataaaatatgtagagcagcagcacgaatgctacttcagaatgcggtgaaattcaatctcgctgagtttcaagaagtgtggcagcagagtgttcctgaaggaatggtaactagtcttgatcagcttaagggtttagcgctggtggatagacactcgagaccagaaatcatatttttgctgaaagtagatgatttacctgaggataatcaggaacgttttaatagccttttctctctaagggagaagtggacagaagaagatattgctccatatattcaagatttgtgtggagagaagcaaaccataggtgcattactcactaaatattctcattcttcgatgcaaaatggtgttaaagtttataattcgagaagacccatttcttaaaagaacaacggtcttttcttcaggactcaagttgctttataaagttgctggatagaagaaaaataacttgtacttttatttctgacttttagaaacctagtcttctaaggcatttttctcctcatcttaagcattttgaaactactgttatttcttaaatgttataggatgtagctttaaaattatatttgtactatgtacacagtgtaaacaaggacaaaagaattctttcctatattatgtctgaggtctctatgatttatttaaagtttggctttttatatttaaaatgtcatttctttacttaggatttgatgttctaatcattaatacacttaagttttccagagaactaaatagtaatagtttcatagaagagaactatttattcacttaaatatcatttctcaagtgagtgagttcccctctacttttagccttccacccaaactggaagcctctaggtgctatcaattatttatatccatcgtttacatccatgaaattggctgaataattactcctctgcctggcgtagacatgcgctttgggaaaaaaacgagtttataatcctataatgaagaatactggcacaggcaatgctcactcgaaaacttcaagtaatttctagttggttttggaatgcttgataaagttcctttacagctttattttcctgatttgttttggtttagatcaaagttcaaattaattttaacttagctaatgaactcatcaccaggacagttggagggggtaggccgaggttaaatggtccacgtttcaaaaatgttaatggctaatccataattaaagaaggtttaactgttactgaagtttacaagttttattgtcatgaacatgaaatacaaacacgatggcttcgaaatgtctttcaataaatgtttctgcattt

SEQ ID NO: 190 - DNA, 2000 bp, Homo sapiens
gaagggcggcgcgcttaggcaggcggtggcgcggctggagtgccgcggggagggctgtgccggttgctttctgcagccgcatctcggccagctctcctcgccgtccccggggcgctgtgcgtctccagtccgggaccgaagccgcctgccgtagcgggcggccagatccgcgtcccgcctcagcggccggaggacatgcgggagagagaatgagccagagggacacgctggtgcatctgtttgccggaggatgtggtggtacagtgggagctattctgacatgtccactggaagttgtaaaaacacgactgcagtcatcttctgtgacgctttatatttctgaagttcagctgaacaccatggctggagccagtgtcaaccgagtagtgtctcccggacctcttcattgcctaaaggtgatcttggaaaaagaagggcctcgttccttgtttagaggactaggccccaatttagtgggggtagccccttccagagcaatatactttgctgcttattcaaactgcaaggaaaagttgaatgatgtatttgatcctgattctacccaagtacatatgatttcagctgcaatggcaggttttactgcaatcacagcaaccaaccccatttggcttataaagactcggttacagcttgatgcaaggaaccgcggggaaaggcgaatgggtgcttttgaatgtgttcgtaaagtgtatcagacagatggactaaaaggattttataggggcatgtctgcttcatatgctggtatatcagagactgttatccattttgttatttatgaaagtataaaacaaaaactactggaatataagactgcttctacaatggaaaatgatgaagagtctgtgaaagaagcatcagattttgtgggaatgatgctagctgctgccacctcaaaaacttgtgccacaactatagcatatccacatgttgtaagaacaagactacgtgaagagggaacaaaatacagatctttttttcagactctatctttgcttgttcaagaagaaggttatgggtctctttatcgtggtctgacaactcatctagtgagacagattccaaacacagccattatgatggccacctatgaattggtggtttacctactcaatggatagcagcacgaggactgctgtactgcaaaaaaagaagaccaaaagattacagtggaccatgggatacagaagccagcatggcagacagaagaaaaatagtttgggaacatgtaactattctaagtggaagttttgttgtaggaattatagtaatcacaccacattacttggcctttcggtaatgtgaaaaaaaaaaaaaacctcagagcctccaaggaaatgcctttagaagcactcctctctcaaaattgccattttctctaccatgtcccccagacacagttgggttttgttgatttatggcagtcttctaaacaaagccatccttaattttacatactgtattgtaactatccaaagatagtattggcagtcataaatttataacttctggcctttgtttaattccagtaaaataacagcaatgacaatgagatcgtcagtattattttcacatttccctgagaggacctggcacaatattttaaatttaattatttggcagtagtcactgtttttgacaaccaatgaaatagcgtctaaatatcttgtatattttttagcatcaaaatgttttggtttccactgctgacaggtgcttgttgtttagcctaatgtggatatttaaattgttaacataccaaacacacatggtaatagtttgggacaaaataactagtaaaatgttgatttctcggctttttcactgactgcggcatgtcctcgtgtcttctctgattttgtggtacatgaatgaatgcatttatctttttagtgacttactagttacgaacttgaattatcacctctttgtcatacttaagtatcatttacataaagtgtaaaagattttttcacttt

SEQ ID NO: 191 - DNA, 1979 bp, Homo sapiens
tgcggggcagcgactgcgccccgtcccggcgccgcgctcgtccgcagaggaggcggcccggcccgggcagctgcggctcgggatccgtcgaggggaggccgagcttgccaagctggcgcccagcggggtcatggtgcccggcgcccgcggcggcggcgcactggcgcgggctgccgggcggggcctcctggctttgctgctcgcggtctccgccccgctccggctgcaggcggaggagctgggtgatggctgtggacacctagtgacttatcaggatagtggcacaatgacatctaagaattatcccgggacctaccccaatcacactgtttgcgaaaagacaattacagtaccaaaggggaaaagactgattctgaggttgggagatttggatatcgaatcccagacctgtgcttctgactatcttctcttcaccagctcttcagatcaatatggtccatactgtggaagtatgactgttcccaaagaactcttgttgaacacaagtgaagtaaccgtccgctttgagagtggatcccacatttctggccggggttttttgctgacctatgcgagcagcgaccatccagatttaataacatgtttggaacgagctagccattatttgaagacagaatacagcaaattctgcccagctggttgtagagacgtagcaggagacatttctgggaatatggtagatggatatagagatacctctttattgtgcaaagctgccatccatgcaggaataattgctgatgaactaggtggccagatcagtgtgcttcagcgcaaagggatcagtcgatatgaagggattctggccaatggtgttctttcgagggatggttccctgtcagacaagcgatttctgtttacctccaatggttgcagcagatccttgagttttgaacctgacgggcaaatcagagcttcttcctcatggcagtcggtcaatgagagtggagaccaagttcactggtctcctggccaagcccgacttcaggaccaaggcccatcatgggcttcgggcgacagtagcaacaaccacaaaccacgagagtggctggagatcgatttgggggagaaaaagaaaataacaggaattaggaccacaggatctacacagtcgaacttcaacttttatgttaagagttttgtgatgaacttcaaaaacaataattctaagtggaagacctataaaggaattgtgaataatgaagaaaaggtgtttcagggtaactctaactttcgggacccagtgcaaaacaatttcatccctcccatcgtggccagatatgtgcgggttgtcccccagacatggcaccagaggatagccttgaaggtggagctcattggttgccagattacacaaggtaatgattcattggtgtggcgcaagacaagtcaaagcaccagtgtttcaactaagaaagaagatgagacaatcacaaggcccatcccctcggaagaaacatccacaggaataaacattacaacggtggctattccattggtgctccttgttgtcctggtgtttgctggaatggggatctttgcagcctttagaaagaagaagaagaaaggaagtccgtatggatcagcagaggctcagaaaacagactgttggaagcagattaaatatccctttgccagacatcagtcagctgagtttaccatcagctatgataatgagaaggagatgacacaaaagttagatctcatcacaagtgatatggcaggttaactccgttgactgccaaaatagcatccccaacgtgcagccctccgcatctatcagcaggttgccccggatggatctcagagatgaggattggaacaccatgttctttcccaccctaacaacaacaaagggcagtaaattaaagtactctttgtaaggtacagttaccgattaatctagagataaaatattttcttaaaaatatatttcattaaacacctatgctgtctct

SEQ ID NO: 192 - DNA, 5554 bp, Homo sapiens
ggcgtggggggagcagatgccgctggctgccagcgggacgccggcgagcagagcgcagccgcgagggaggcgcgagggaggcgagccggagcccgagcactagcagcagccggagtcggcgtaaagcacccgggcgcagccggagccggtgccgcagctgcgatggccgtggccgtggggagaccgtctaatgaagagcttcgaaacttgtctttgtctggccatgtgggatttgacagcctccctgaccagctggtcaacaagtctacttctcaaggattctgtttcaacatcctttgtgttggtgagacaggcattggcaaatccacgttaatggacactttgttcaacaccaaatttgaaagtgacccagctactcacaatgaaccaggtgttcggttaaaagccagaagttatgagcttcaggaaagcaatgtacggctgaagttaaccattgttgacaccgtgggatttggagaccagataaataaagatgacagctataagccgatagtagaatatattgatgcccagttcgaggcctacctgcaagaggaattgaagattaaacgttctctcttcaactaccatgacacgaggatccatgcctgcctctactttattgcccctactggacattcactaaagtccctggatctggtcaccatgaaaaagctggacagtaaggtgaacatcattccaataattgcaaaagctgacaccattgccaagaatgaactgcacaaattcaagagtaagatcatgagtgaactggtcagcaatggggtccagatatatcagtttcccactgatgaagaaacggtggcagagattaacgcaacaatgagtgtccatctcccatttgcagtggttggcagcaccgaagaggtgaagattggcaacaagatggcaaaggccaggcagtacccctggggtgtggtgcaggttgagaatgaaaatcattgcgattttgtgaaacttcgagagatgctgatccgcgtgaacatggaggacttgcgagagcagactcacacccgccactatgaattgtaccgacgctgtaagcttgaagagatggggttcaaggacactgaccctgacagcaaacccttcagtcttcaggagacatatgaagcaaaaaggaatgaattcctgggagaactgcagaagaaagaagaagaaatgagacaaatgtttgttatgagagtgaaggagaaagaagctgaacttaaggaggcagagaaagagcttcacgagaagtttgaccttctaaagcggacacaccaagaagaaaagaagaaagtggaagacaagaagaaggagcttgaggaggaggtgaacaacttccagaagaagaaagcagcggctcagttactacagtcccaggcccagcaatctggggcccagcaaaccaagaaagacaaggataagaaaaatgcaagcttcacataaagcctggcaagccaaggatgttcccgcattcacctgcttttgcagtaatatcgtatctctgccatgtgtgttctttagttttattttattttattttatttttttacccttcctcaaacaccagtaactattattaactcgttttgctgaatgttgttgggtggtagaaaatgatagaacaagggaataaccgcgaatgctctgtgcagctggactctgtttccggaaagtaaatgatttgctttttatgcctgttctgaatggcagcacgaagcaggcctgttacttgtatgtcgctttggacagaggaaagtggggtaaaatgctacctgtacgtctgacatgaaaacttctcaccgcctcagcagctgaactaaaaacctgaatagccatgacaagagtttgcattttcttgatgattcatctccatgagtgcacaatccctgaactcactgtcttttctccacacttgtcctaagccaaggtagatttgtacgtagacagactggtgagcaagcattatattttatttttacccttgcatgacattttcattttaatcaataacattatttggcctgagcttgtgggtctgttcagactgtctcctctcatggtttgaaactgcatctgaatgcctgccttcaatcctggccaagttggagtagactggtatgagaaaactatgattagttcacatttactggtgcatccttgatcctctcacagatagaggtcttaaaggttggatcatgtaacattgcttagtagaagaatcttcttctaaggatgatgggctttctacagcctgcttaccactaacagtaaggaatctttcataaacacacctcagtttgttcccagtgggcttagagggaggacctgatgactgattccaggatacttgtacttctaataacatttttcatgaatcatgagaaaatttccacagatacttcccttagaaaatttgctataaactctgtatcattggtagcacaaatttgagcgaggccttgtcaattttaaggtggaaataggaaggaccacaacatgacccgtaagtcaagaaggtagacatttcatatccagcttccttgcttagtctcctttcagtatttggcaataaaagaaagaagaaatagaacagctgaagtctcaaatcattgtctggaattttcctcaccttggctagctccacctgctctttgtctaaggcccttgcctcatcagggattagaactggcccatatgccagaacctgtactaaatgcctaatttgtatggaagagtgcatatttaatctcttttctatactgctcctttctgatgcttatcctttcatctgtgtgattgttttttcccctctactaacaagatcctcccagctttctctctacatgtagaaaggataacatttctcatgaacccactgcccctctgcattttcctcactggttagagattaagtaaataggatagaatatgctgcgtctcccctgacacacactttcttttttgaatgagcaagtctccattttgatttcagcaaagattttttctccttttctttgtcctcaaccatacttagaggaaagaaggaatggtcttccatgaactgattatgcttaattaagcaaagtaaggaaattagtttcatggaagcctaaacaaagctggaatagaaactacacactagacacagcagtagtcatagtcttcacaggtttaggagctactggaccaacattcttgtttttgcttttgtttttttaaataattctagtctggagctaactgtggagcagccaaatagtagctggcatgttgattcaaaccatgggctgaatttgctcataggctgtgcatcagacaaaagcttgaatatttgtgttgtatgcttgttccaaccaccgcttgtgtgagcatttttgtggcttgtacagaaagtacacttttaaattgtctcttgcatcactaaaatttttttaaaatgagcataacaacgaaaggcatccagctgactttttgattccaagattattgattggattgacttttttgcattaaatttttcccagcaaaataaatcatatggcgagtcagggaataaaaagtcaaaagaaacaaatagaagcttttttttttaaaaaatgtattgcttctgaacttttttctgccactgctccctagccctgtttagtttgttattgctgcttttcttttttctttctgtatctatgcctttttttcacagtagtccttggctctgcacggaataaatgataccctcaaatctaattggatgtgctttcgcctttgcatgtaagtacggtagtaagaaacctttgagatctttctgacttttcaaaattagagaaagcaaatgggatggatagattttttttttcttttcaaggggggcaggaaggtaatggtttgagtagcctttgtttaaaaaaaagactaaatatatttaaaaggccacatttatatttttttcacaagaaccacataataaattccacttcttgacctgaatttggaaatccgaaattactaatccaggccaggtgtggtggctcatgcctgtaatcccagcactttgagaggccgaggtgggcagatcacttgaggcctggagttcaagaccaccttggcgaacacggtgaaaccccgtctctacaaaaaatacaaaaattagccaggcgtggtggcacgtgcctgtagtcccagctacttgggaggctaagtcaggagaattgcttgaacttgggagatggaggttgcagtgagccaagattgcaccactgcattccaacctgggtgatgaagtgagactctccaaaaaaaaaaaagaaattattaatccctgcctgtgctctacatagcctcatgggcatcattggatagctcagagggcccttgattctggcaaggcaaataaagccagaatgagaaattaccatcttctactagagaaaaccaagagaaaaatttttatgctaggatgcctttatgaccacttaattttttaatcttagtttaatggtctctccctggtgctaactgctgacagtggccacctcttttttggggattgaggggcctacataactagctggccttaccccatatcttttgttcaaacataataccatctttttgcttcttctgaactttagatctccataacacatgtactgtagaatgtgatggaaaagcattgatgagaatttattggcagttcagattgtgttttcccaacttaggctctttattaattggttaaggttttctccaaaaagggcatttcaacaatgggaattatttaatgtaacagtgggcacagattacttatcttccttctctgctttgtgactcaccagcagtaacacacacaatccacatcttgtgcacctcaaatgaacagacttggtttccttgctttcttgacatttccatgactgtttcacatacaaactattgggtgaggtttttcagctgttaccgacccacgtcctgctgtctctgtgtggtcctacaaaaactgtccattcccacccctttgctttgccatttgcaagagtctggaattgtcaggtctcagcttcgaaaagtcctggttccactgacaggacacattctttagtgggaattaagacctacaaagtctagtttgtatgtaggtatgaagggaattttttaaataaattgaaaagctgtgaacagcattagaactttgtctatttcttaattttaaaatatgctgatatgccttaaactgtagttgtagatccttgtcattttgctgtttgaaaataaccaatgtgttttctaaaactgtcgtgtaatctactttcattgttaatgcagaattgtcatatatgtaagctgcatgttagacatttgtcttttttaaactaaagtaattgtattgatgtgaagcatatcattttttcaaatatgaaagtgatcacttagcaacatgcttggtaatttggcatctgttaaggtaggagagtggtgaacagataatctatgcatatatcactagtgccaagacataaagcgggggaaaatatatttttacccaaacatt

SEQ ID NO: 193 - DNA, 2740 bp, Homo sapiens
ccgggttctctcccggcgtgccccgcgccgggtttgttggggggtactcggcagtgcagccatgactatactccccaaaaagaagccgccgcctcccgacgccgaccccgccaacgagccgccgccgcccgggccgatgcccccggcgccgcggcgcggcggaggtgtgggcgtgggcggcggcggcacgggcgtgggcggcggcgatcgcgaccgtgactccggcgtcgtgggggcccgtccgcgagcttcgccaccgcctcaaggcccgctaccaggaccgccgggcgctcttcatcgctgggcgctggccgtgccgcctggtgcagtggcgggtccccggccacaacaggcttctccacctccttgcgggggcccaggtggtcccggcggcggtcccggcgacgcgctgggcgcagcggcggcgggtgtgggtgccgcgggcgtggtggtgggtgtgggtggtgccgtaggcgtgggcggctgctgctccgggcctgggcacagcaagcggcgacgtcaagctcccggggttggcgcggttggcgggggcagtcccgagcgtgaggaggtcggcgcaggctacaacagtgaggacgagtatgaggcggctgcagcacgcatcgaggctatggaccctgccactgtcgagcagcaggagcattggtttgaaaaggccctacgagacaagaagggcttcatcatcaagcagatgaaggaggatggcgcctgtctcttccgggctgtagctgaccaggtgtatggagaccaggacatgcatgaggttgtgcgaaagcattgcatggactatctgatgaagaatgccgactacttctccaactatgtcacagaggactttaccacctacattaacaggaagcggaaaaacaattgccatggcaaccacattgagatgcaggccatggcagagatgtacaaccgtcctgtggaggtgtaccagtacagcacaggtacttctgcagtggaacccatcaacacattccatgggatacatcaaaacgaggacgaacccattcgtgttagctaccatcggaatatccactataattcagtggtgaatcctaacaaggccaccattggtgtggggctgggcctgccatcattcaaaccagggtttgcagagcagtctctgatgaagaatgccataaaaacatcggaggagtcatggattgaacagcagatgctagaagacaagaaacgggccacagactgggaggccacaaatgaagccatcgaggagcaggtggctcgggaatcctacctgcagtggttgcgggatcaggagaaacaggctcgccaggtccgaggccccagccagccccggaaagccagcgccacatgcagttcggccacagcagcagcctccagtggcctggaggagtggactagccggtccccgcggcagcggagttcagcctcgtcacctgagcaccctgagctgcatgctgaattgggcatgaagcccccttccccaggcactgttttagctcttgccaaacctccttcgccctgtgcgccaggtacaagcagtcagttctcggcaggggccgaccgggcaacttccccccttgtgtccctctaccctgctttggagtgccgggccctcattcagcagatgtccccctctgcctttggtctgaatgactgggatgatgatgagatcctagcttcggtgctggcagtgtcccaacaggaatacctagacagtatgaagaaaaacaaagtgcacagagacccgcccccagacaagagttgatggagacccagggattggacaccatctcccaaccccagtactcctgctctccggtgccacctcaccttctttggcttcttccctcttgcctccttctgttctttctgctctcccctcttttccctcctcctcacttccctctggctagcccacccctgcactctctctcattgccgctgccactatcacctgtctctctgccagctgatgtgccctgttgccccccaccccatcccgcacagaaccatccctgcattccacaggggactcgggcaagggtgccgaagatagacaagaggcacacagagacagaccaactggcagccaggcagccccagaggagagagacattcagacagaggaaagtctccctgcccctcattccttccaagatgagaaaaacttgccgccaccccccgacactgatgccagggaggtgggaggaagaagtgggaaatttcccttcccagtacccccaagaacgtctgagccttcaatgttgaattttttctttattaaaattacttttatcttataaaatcaactaatcaaaaatgatatagacgacagcactggctctgtgaaggtggcatctttctgggcaggcaggccatggggcatggaggagggtgcaaagatatgggttgctgtcttctggcctccagctgcatggaggccggcccagggtctagggtgtgcactgggcaagggcagggcggcaggtgtcaggccggcttggacaatgaaaccctgaccttgctgcattccttttgcttccaccaccactagcttctttggaatcttggggtgggggtcatctttggggattatggctgccacccgggatttgagtgtagggagtgtgggagcagccttggcagatggggcacccgtgccctgcaggtgttgacaagatccgccatctgtaatgtccttggcacaataaaaccaaatgtcagtttc

SEQ ID NO: 194 - DNA, 8682 bp, Homo sapiens
gaggctttgcggtggctgcttggcttggcggtggtcgcttggcttggcgtggcagtgatcgcttggcttggcatttctggcttggcggtcctcctttcgcagattggaaaccgcgggctatcctgctgggaggttgtggccgaggcagtagctcgctactgatggcctcctggggtggagaaaagcggggaggggctgaggggtctccgaagctggcagtctacgccacgaggaagacccgtagcgtcaggagccaggaggaccagtggtacttgggctacccgggggaccagtggtcttcgggcttctcctacagctggtggaaaaatagcgtcggcagcgagagcaagcacggtgagggcgccttagaccagccccagcacgacgtccgcctggaagatcttggcgagctccacagagctgcccggtcgggcgacgtccctggggtggagcacgtcttggctcctggagacactggcgtggacaagagggataggaagaagagcattcagcaactagttcctgaatataaggaaaaacagacacctgaaagtcttcctcaaaataacaatccagattggcatcctactaatttgacccttagtgatgagacttgtcagagatccaagaatctgaaagttggtgataaaagtccatctgtatcaccatcaatgcctgaaaatcagtcagcaaccaaagaactgggacagatgaacttaacagaacgagaaaaaatggacactggagttgtacttctctcagggaatgatactctccatgacctgtgccaatcacagctaccagaaaacaaagagagcaaagaagcagaacaagacttggagctgacatcagaggaagagcaagaaagacttaaaggatgcgaaaataagcagccacagaaaacgtctcaagaaccagaaatggctaaggattgtgatagagaggatatacctatatatccagtacttcctcatgtgcaaaaatctgaggaaatgtggattgaacaaggcaaattagagtggaaaaaccaattaaaactcgtcataaatgagttaaagcagaggtttggtgaaatttatgaaaaatacaaaattccggcttgtcctgaggaagagccactacttgataactctacaagaggaacagatgtgaaggatattccctttaatttgacaaataacatacctggttgtgaggaagaagatgcatctgaaatatctgtctcagtggtattcgagacatttcctgaacaaaaagaacccagtctcaaaaatatcatccatccatactatcatccgtactctgggtcccaggaacatgtttgccagtcatcttctaagcttcatttacatgaaaataaattagactgcgacaatgataacaaactaggcattggacatatttttagtacagataacaactttcataatgatgcaagcactaagaaagcaaggaacccagaagtggttacggttgaaatgaaagaagaccaagagtttgatttgcaaatgacaaaaaatatgaaccaaaatagtgacagtggcagtacaaataactataaaagcctgaaacctaaattagaaaatctgagttctttaccaccagattctgacagaacatcagaagtatatctacatgaagaattacagcaagacatgcaaaagtttaagaatgaggtcaacacattagaagaagagttcctggctttgaagaaagaaaatgttcaacttcataaagaggttgaagaagaaatggagaagcacagaagtaatagcacagaattatcaggaaccctaactgatggtactactgttggcaatgatgatgatggactaaatcagcagattcctaggaaggaaaatgaagagcatgacaggcctgcagataaaacagctaatgaaaagaacaaggtcaaaaaccaaatatatcctgaggctgactttgctgactcaatggagccatctgaaatagcctcagaggattgtgaattgtctcactctgtttatgagaattttatgttgctggaacaacttagaatggagtataaagattctgctagcctaccaagaatccaagacacattttgtttgtgtgaacacttactgaaacttaagaataatcactgtgaccaacttacagtaaaacttaaacaaatggaaaatatggtcagtgtactacaaaatgagctatctgaaacaaaaaagacaaaattacagttagaacttcaaaaaattgaatgggagaaagagctgtacgatttgagacttgccttaaaacaagaaaatgggagaaaagaaatgccgatatgttgtataataaagatagtgaacagttaagaataaaagaagaggagtgtgggaaagtggttgaaacaaagcaacaacttaaatggaatctgagaagacttgttaaggaattgaggacagtaagaaataacttggatctggttgtgcaggagagaaacgatgcccagaagcaactttctgaagaacaggatgccagaatattacaagatcagattctgacaagtaaacaaaaggaactagaaatggctcaaaagaaaatgaattctgagatttctcataggcatcagaaagaaaagcatctctttcatgaaaattgcatgttgcaggaagaaattgccttgctgagactggaaatagatacaataaaaaatcagaacaagcaaaaggaaaagaaatattttgaggacattgaggctgtgaaagaaaagaatgataaccttcaaaaaattataaaactaaatgaggaaacattaacagaaacaatactccagtacagtggacagctgaacaatctgacagctgagaacaaaatactcaattctgaactggagaatgggaaacagaaccaagaaagactagaaatagaaatggaatcataccgttgtagactggctgctgctgtacgtgactgtgatcaaagtcagacagcaagagacctaaaacttgatttccagagaacaagacaagagtgggttcgtttacatgacaaaatgaaggttgatatgtctggcctacaagctaagaatgagattctttctgaaaaactttctaatgctgaaagtaaaattaacagcctacaaattcagctccataacacaagagatgctcttggaagagagagtttgattttggaacgtgtgcaaagagacctcagccaaacacagtgtcagaagaaagaaactgaacaaatgtaccaaattgaacaaagcaaactgaagaaatacattgccaagcaggaatctgtagaggagagattatctcaactacaaagtgaaaatacgttgcttcgacagcaactggatgatgctcacaagaaagctaacagtcaagaaaagacaagcagtactatccaagaccagtttcattctgctgccaaaaatcttcaagctgagagtgaaaagcagattctttcactacaagagaagaacaaggagctgatggatgaatataatcatttaaaagaaagaatggatcaatgtgagaaagagaaagcaggaagaaaaattgaccttacagaagcacaggaaactgtaccttcacgatgtctacatctggatgcagagaatgaagttcttcaacttcaacagacattattctctatgaaagcaatacaaaagcaatgtgaaacactacagaagaataagaagcagctgaaacaagaagtagtaaacctcaaaagttatatggaaagaaatatgttagaacgtggtgaaggtgaacggcataaactgttgattgaagaaagagcaaggaaggagatacaagaaaaattaaacgaagccgttctcaccttgcagaaacaagcagcagtatctcatgaacagttagcacagttaagggaggataatactacttcaataaaaactcagatggaactcacaatcaaagatctggaatctgaaatctccagaataaaaacttcgcaagccgactttaataaaaccgaattggaaagatataaggaactctacctagaagaagtaaaagttagagaatccttgtcaaatgaactcagtagaactaatgagatgatagcagaggtcagtacgcaacttactgtggagaaagagcagaccagatccagatctctattcactgcttatgctacaaggccagtcctaagtcaccttgcgttggaaatcttaatgatagtgaaggtctcaacagaaaacatattccaagaaaaaagaggtctgctcttaaggacatggagagctacttgttgaagatgcagcagaagttgcaaaatgatctaactgcagaagtagcagctgctactaaatatgaacctggatcctatatagcttctcctctaggatttacacacaaggaaaatctgaatcaagatccagttttggaagtaacaaaagagtatgcacagattttaagaagaaaatacatactctgaaagataaggcaattttatttgggctattcacatgatattttgtttcccattaaatatatgatgtgaacatttttactaaagggaaatattctatattatacatgtctgatgaaaatttatgtagtattttaaataatgtttcttggcctcttcagctaacttttaagtggattttgcaaatgaaaaccagtattactgagttttacatactcgaactgcccaaatgtttgctgtttaaacagccaaataatcaagttgccattagtaatttagtggagccaattgatggcttgtttgtattttataattttatctttatacatagtgatagatttaagtttagatagacatcattttggtatactggtactgtggtcattgtcaatgtttggatgtattacgattgttatagtgcaatcaaacttagataattttaattttaagcactgatttatttagatctttccttgtggaaaaataaggtttgcctaaggctttttgcttttttatttattgtttcatttctttattagattaacttttgggaaacagtcttaaaattggagaaaatttccacattttaggaaaaacagcttcccccctgtgggccatttgagagtaaattgctgacattatgccatcacatctggtatgtgggtattcccacaagtcaggacattttatataactacttcataatcagaaagttaacatcaatacacttgatcatttaattctcagtttcttttcaagttttcttaattgtctataatgttctttgtagcagaaggatcccattcaggtccatgaatttcatttagttgtcatgactctttcagtctggaacagttcctcagtttttctttgacctttatgaccttaaatcttttgaagagtaaagtccaataatacagaatgtccctccattggatttctctgaactttttttatgataagatttagatgataattttttttttggcaagagtatcacagaagttatcccatgatcttctcactgcattctatcaggtgacctgcaattattattattttttattttcatcttttaagttcaggggtacatgtgcaggatgtgcaggatgtccaggtttgttacataggtaaatatgtgccatggtggtttgctgcacagatcatcccatcacctaggtattaatagtagcccagcatccattagctgttcttcacgatgctctcccttctctcacccgccaccatcccacatgcccctgtgtgtgttgttccccgccatgtgtccatgtgttgtcattattcagctcccacttgtaagtgagagcatgcagtatttcattttctatttctgtgttggtttgctgaggataatgttctgcagctccacccatgtccctgcaaaggacatgtctcattccttttcatggctgcatagtattccatggtgtatatgtaccacattttctttatccagtttatcattgatgggcttttaggttgattctttgtctttgctgttgtgaatagtgctgcaatgaacatacgtgtgtgtgtatctttatactagaattagttatattcctttgggtatacaccaagtaatgggattgctgggttaaatggtatttcaggttctagatctttgaggaatcaccacactgtcttccacactggttgaactaatttacactcctatcaacggtgtaaaagcattcctgtttctccataatcttgccagcatcttttcagttttttgaattatagccattctgactgttgtgagatggtgtcttgttgtggttttgatttgcatttctcagatgatcagtgatgttgaggtttttttgtttgttggctgcatgtatgccttcttttgaaaagtgtctgtttgtgtcctttgaccactttctaatggggttgagttttttttttcttgtaaatttgtttaagttccttgtagatgctggatattagacctttgtcagatggatagagtgcaaaaattttctcccattctgtaggttgtcggtttactctgttgataggttcttaatgctgtgcagaagctctttagtttaattagatcccatttgtcaattttggcttttgttgcaattgcttttggcatcttcgtcatgaaatctttgcccttgcctgtgtcctgaatggcattgcctaggttttctttcaggatttttatagttttgggttgtagatttaagtctttaatccatcttgagttaacttttgtatatgggttaaggaaggggtccagtttcaatttgctgcatatggctagccagttctcccagcaccatttattaaatagggaatcttttccccattgcttccttttgtcaggtttgtcaaagatcacatggttgtaggtgtgtggtcttatttctgggttctctattctgttccattggtctatgtgtcggttcttgtaccagcaccatgctgttttggttactgtagtcttgtagtatattttgaagctgggtagcatgatgcctctagctttgctcttcttgcttaggattgtcttggctatttgggctctgttttggttccatatgaattttaaaatagctttttctaggtctgtaaagaaggtcaatagtagtttaatgggcctagcatttaatttacagattgctttgggcagtgtggtcattttcacgatattgatccttcctgtctgtgagcatatgtttttccatttgtttgtgtcatctctgatttctttgaataatggtttatagttatccttgaaaaggtccttcacttttcttgttagctgtattcctaggtattatactcttcttgtggcaattgtgaatgggagttaattcatgatttttctctcggcttgcctgttgttggtgtataggaatgctagtgacttttgcacattgattttgtatcctgagactttgttgaagttgcttatcagctaagaggtttttgagctgagatgatggagttttctagatataggatcatatcatctgcaaacaaagatagtttgacttcctgtcttcctatttgaatagcttttctttctttctcttgcctgattgccttggtgagaatttctaatactgtgttgaataggagtggtgagagagggcatctttgtcttgtgtcagttttcaagggaacgcttccaggttttcaggtactcaggcaacaaatagcgctacgaatagaatagtacctcacatctcaatgctaatgttgaacgtaaatggcctaaatgctccacttaaaagatatagaatggcagaatgggtaagaattcaccaaccaagttgctgctgtcttcaggagactcacctaacacatacggactcacataaacttaaggcaaagggttggaaaaagacacttcgtctaaatggacacatcaaaagcgagcaggagtagctgttcttatatcagacaaaacggactttaagacaacagcagttttaaaaagacaaagagggacattatataatgataaaaggactagttcaacaggaaaatatcacagtcctaaatatatatgcacctaatactggagatcccaaatttataaaacaattactactagacataagaaatgaggtagttggcaacacaataatagtgggggatgttaatactccgctggcagcactaggcagatcaccaagacagaaagtcaacaaagaaacaatggacttaaactataccctagaacaaatggacttaacagatacttacagaacattctacccaacaagcatagaatatacattgtatacatcagaacacgggacattctccaaaatagaccatatgatagggcacaaaacaagtctcagtaaatttaagaaaatcagaattatatcaagtactctctcagaccacagtggaataaaattggaaattaattccgaaaggaacactcaaaagcatgcaaatacatggtaattaaataacctactcctgaatgattgttgggtcaacaatgatatcaagagggaaatttaaaaattctttgaactgaacgataatagtgacacagcctatcaaaaactctgggatacagcaaaagtggaggtaagaagaaaattcatagcattaaatgcctatatcaaaaagtctgaaagagcacaaataaacaatctaaggtcacacctcacagaattggagaaactagaacagtccaaatccaaacccagcagaagaaaagaaataacaaaatcagaacaaaactaaatg

SEQ ID NO: 195 - DNA, 1436 bp, Homo sapiens
tttcattttgggccgagctggaggcggcggggccgtcccggaacggctgcggccgggcaccccgggagttaatccgaaagcgccgcaagccccgcgggccggccgcaccgcacgtgtcaccgagaagctgatgtagagagagacacagaaggagacagaaagcaagagaccagagtcccgggaaagtcctgccgcgcctcgggacaattataaaaatgtggccccctgggtcagcctcccagccaccgccctcacctgccgcggccacaggtctgcatccagcggctcgccctgtgtccctgcagtgccggctcagcatgtgtccagcgcgcagcctcctccttgtggctaccctggtcctcctggaccacctcagtttggccagaaacctccccgtggccactccagacccaggaatgttcccatgccttcaccactcccaaaacctgctgagggccgtcagcaacatgctccagaaggccagacaaactctagaattttacccttgcacttctgaagagattgatcatgaagatatcacaaaagataaaaccagcacagtggaggcctgtttaccattggaattaaccaagaatgagagttgcctaaattccagagagacctctttcataactaatgggagttgcctggcctccagaaagacctcttttatgatggccctgtgccttagtagtatttatgaagacttgaagatgtaccaggtggagttcaagaccatgaatgcaaagcttctgatggatcctaagaggcagatctttctagatcaaaacatgctggcagttattgatgagctgatgcaggccctgaatttcaacagtgagactgtgccacaaaaatcctcccttgaagaaccggatttttataaaactaaaatcaagctctgcatacttcttcatgctttcagaattcgggcagtgactattgatagagtgatgagctatctgaatgcttcctaaaaagcgaggtccctccaaaccgttgtcatttttataaaactttgaaatgaggaaactttgataggatgtggattaagaactagggagggggaaagaaggatgggactattacatccacatgatacctctgatcaagtatttttgacatttactgtggataaattgtttttaagttttcatgaatgaattgctaagaagggaaaatatccatcctgaaggtgtttttcattcactttaatagaagggcaaatatttataagctatttctgtaccaaagtgtttgtggaaacaaacatgtaagcataacttattttaaaatatttatttatataacttggtaatcatgaaagcatctgagctaacttatatttatttatgttatatttattaaattatttatcaagtgtatttgaaaaatatttttaagtgttctaaaaataaaagtattgaattaaagtg

SEQ ID NO: 196 - DNA, 1490 bp, Homo sapiens
gctggaggagctcgaggctgaggctgccggggggctgtgggctaccgggccgccggcgcctcagcgatgttttactcagggctcctcactgagggcggccgcaaggagaccgacatgcgggaggcggcgtcactgcgacagcagcgccggatgaagcaggcggtgcagttcatccacaaggactccgccgacctgctgcccctggacggcctcaagaagctgggctcgtccaaggacatgcaacctcataatattctgcagaggcgcctcatggaaaccaacctgtctaagctccgaagcggtccccgtgtcccttgggcctctaagacgaacaaactcaatcaggctaagtctgaggggctaaagaagtctgaggaggatgacatgattttggtttcttgccagtgtgctggaaaggatgtgaaagccttggttgacacaggctgcctatataatctcatctctttggcctgtgtggacagattgggactcaaggagcatgtcaaatcccacaagcatgaaggagaaaagctttctctaccccggcatctcaaagtagtgggccagattgagcacctagtgatcacactgggctccctccgcctggactgcccagcagctgtggttgatgacaatgagaaaaacttgtcccttggtctacagactctccgatctctgaagtgcatcataaacttggataagcaccggctgatcatggggaagacagacaaggaagaaatcccttttgtggagacagtctctttgaatgaagacaacacttcagaagcataactacagcctgcagcatgtctgcacgtgtgcatgcatacacaccgggttgacagatagagaaaactgggtttgaaccaaatgccgtagtgacttgctgtggaccaagtccttccatctaatagaagctccaggggctccttcccattcagacctctctagactatagtctatgcttagagatcttgtctggttatggccattgttttttactactttgatcacttaacttatagaccttttttgacactgccagtctcacttgtggcctatttctctgcttcttccaggaatttgcttttattagtcaagtataggggctgccaggttctgtgtctccatagatatatgtgcttcttttcctatagctaaatgtataataaacaggaacctgacctttacctcctttcagctgtttcaaacaggtgccaggatacctatgtcttagaattagagtttcttcaaattgattcattgatttctcaagtatggattatgtgaaagagcccagggacattatccattacagtttaactctttcatttaaaggtccagagaggcaagtgaattgtctaagttcatatattaggtcagtgactgaagggaccaagaacgcagacctgatttccaagccaagactcccatgctgcctcatttgtattcaagcctttaacaggagggcaaagaggtgagaatgtgtt

SEQ ID NO: 197 - DNA, 3738 bp, Homo sapiens
ctgctgggcccggtggccgcaaaagaactttctttctcccgcccgaacggtcgccgcggccaactgcctcgcccgcctggcagcctaaccctccttctcttcttctcctctccggcttcgcgcggccctgcctccctctcgcccggcggcatccgcttgctgctgccaccgcctcctcatcttctgcccggccaaccggcctgccccgctgcagtgatgtgcgacaaggagttcatgtgggccctgaaaaacggagacttggatgaggtgaaagactatgtggccaagggagaagatgtcaaccggacactagaaggtggaaggaaacctcttcattatgcagcagattgtgggcagcttgaaatcctggaatttctgctgctgaaaggagcagatattaatgctccagataaacatcatattactcctcttctgtctgctgtctatgagggtcatgtttcctgtgtgaaattgcttctgtcaaagggtgctgataagactgtgaaaggcccagatggactgaccgcctttgaagccactgacaaccaggcaatcaaagctcttctccagtgatggatggatggactgataactccggaagaatgactctcctgtggcctcacactgctgcctgtctgtctgtcactctctatctgccagcttcttcagctaaatactttaagaggggtgaggggagagagaaattcataacaaatccgactaccagaaaaaaaaaattgttttggaggaggggcaaaaggaaccatgatcaggcttttactgggattcctgatcaagtaagcctcttccctttctaataaaatatacaccttatacccaagggagagcaaagacaaaatacaccagtaacatttgaccttttcagctccctagctaatttattagattgtgttgaaggtctgattctacaaaggccaactctacatatttggtagccctaactgtctgagcagtagtggctgctgtgatgtaaacttagggtgctgagataagcaattagctctagccttctgccttaagaatgcactctactggggatttcctggcatagttaagagcgctgcctataaggttggtgaccaaatctttcctcggtgactttaagctttatgtgaaagcttagttaaggtgaggaggggcacactcctaaattgctggatgactgaactttggattttctctcccctttcacatggatttcatgtctctttagataaaactgactagttttatttataaaatcttaagttttggaagtctaaaggagaaaccattccagtatgcatatttttttctcctctagattcatacatttatatagcattgaaacactttcaaactcctgctggtagtaaaaggggatttaaaaatagaatcatagccataagcctgttagtatcatatgaagagagaacagttatcttagtacctatggattttctttatttgctgtttgaatggattgaccttggttatgtgttgagaattaaggaacattctttgaaatgcctctctcagacccatcttggaggctgattacttactgcaccaaagctatcactggggtgagatttactgtttggacaaatttagccccatcccttcaaaaatacacttgtaaccaggtttcccagagttgttgataggcttctgctgaacatatgccaacccacctgcataatatatttttgttgcttttataaatcatgcattacataaagtgtgacaacttcaaaatgtattctctgttcttggaatacagtgccctaaaatggtgttcttatgacctgcagaaaatatttacacatatttccaaatatttatttcatgagcagtacagctaattaaaatatataagcttaaattttatatcttacatttaaaatattaagattcctttgacttgccatccatataagcttgctaaaaatattaagaccaagtcatgcaataattgaatgtacctcaaatttttaggggagggtgggttagggactgatactcagattgtggataataattgaattggtttttaaaggcaacatagcattctacagcagggttaatctattatcaagaacagtcaccctggttaataacaagttttactgatcagttgctggttggttggttggttggcatgtgggtgtgtgggtgtataggtgtgtgtgggtgtgtgtgtgtatttttccccatgagtcctttttttaatcctgtggctttttcacttacaactagcctaaccctgtaattttcctacatccaagaaaacaatcacaaagtagtggtttaaatactttgttgtatttggctaattttgctgtcttaatgcagcctattaagagttgggttaaaaatcagtaatcagtactttattacatcactgaactaaaatatggagacatcctcattgaaaatggagggcactctatcagtctataactatcaacgtagtgcaacagggtgttttgatacctttgttttcacctcttgacataatgctatttaaaggcttgaatttttccctttatataattttcacctttactttcaaagtgttttgttgtagttggctattgcagagagtgcattgtcctatcattcctaaacctggtctgctttctacattcatggtatggaaaccatgtgattctttgtacagtttatcctgatgttgcttgtaatgcagtagaggctatttcgccttcgcttttctttctcgacctttttgtaaaccctataattatgaagcgattgcttgagaaaataacatataaacatagaatagaatagactgaccaagatggttcacagtttctttttttaactaggttatttataatgtatttctgaaccacttggcagacaaattcacaacacttaatgttcatattttgagtaaaggaagctaaaaccatgtttgctttctggtactacatgcattagcgaaaggttaagtaagttttgttctccactgaagtaatacttaacatctcagaaaaaattttgcatgttctgtagttttgtattaaatcagtcatttcatatgcactatatcaagtacaaacaggtagtttacctgtttatagtagtgtactaacaaagtctcccttgcagcttcagactgttatctataggcttatcgttcaaatacagcacttgaatatcccaagtagttcttctacgcatagctcacctttctaaacccagttaagcatggaagagaggtagtaggtaggtgcagtgtgtggaagctgcaaacaagtaggccttttattcattgatatcttttcccaagtactggattttaaatctgtatgtatctgtttgatttttttttctaatatttcagttgagctgctgttttcttccatgcaatattgtatactcaattgtgtatagaagaagctggtgagagtgccctcctacataaataagcaattgcagtgttttgcatgcaaaatataaaaaatttaaattgtcctgattctattttgtaaatggagaaacaatcatatctttctaagcggtaatggaggaagactagtgctttgtgcattttgatatatttgagttcattttttccacaatgtcatacttttgacgcagttgggtttctcataagtatcctagttcatgtacatccgaatgctaaataatactgtgttttaagttttgtgttgcaagaacaaatggaataaacttgaattgtgctac

SEQ ID NO: 198 - DNA, 8287 bp, Homo sapiens
gcgcccaggagcagagccgcgctcgctccactcagctcccagctcccaggactccgctggctcctcgcaagtcctgccgcccagcccgccgggatgcagtccgggccgcggcccccacttccagcccccggcctggccttggctttgaccctgactatgttggccagacttgcatccgcggcttccttcttcggtgagaaccacctggaggtgcctgtggccacggctctgaccgacatagacctgcagctgcagttctccacgtcccagcccgaagccctccttctcctggcagcaggcccagctgaccacctcctgctgcagctctactctggacgcctgcaggtcagacttgttctgggccaggaggagctgaggctgcagactccagcagagacgctgctgagtgactccatcccccacactgtggtgctgactgtcgtagagggctgggccacgttgtcagtcgatgggtttctgaacgcctcctcagcagtcccaggagcccccctagaggtcccctatgggctctttgttgggggcactgggacccttggcctgccctacctgaggggaaccagccgacccctgaggggttgcctccatgcagccaccctcaatggccgcagcctcctccggcctctgacccccgatgtgcatgagggctgtgctgaagagttttctgccagtgatgatgtggccctgggcttctctgggccccactctctggctgccttccctgcctggggcactcaggacgaaggaaccctagagtttacactcaccacacagagccggcaggcacccttggccttccaggcagggggccggcgtggggacttcatctatgtggacatatttgagggccacctgcgggccgtggtggagaagggccagggtaccgtattgctccacaacagtgtgcctgtggccgatgggcagccccatgaggtcagtgtccacatcaatgctcaccggctggaaatctccgtggaccagtaccctacgcatacttcgaaccgaggagtcctcagctacctggagccacggggcagtctccttctcggggggctggatgcagaggcctctcgtcacctccaggaacaccgcctgggcctgacaccagaggccaccaatgcctccctgctgggctgcatggaagacctcagtgtcaatggccagaggcgggggctgcgggaagctttgctgacgcgcaacatggcagccggctgcaggctggaggaggaggagtatgaggacgatgcctatggacattatgaagctttctccaccctggcccctgaggcttggccagccatggagctgcctgagccatgcgtgcctgagccagggctgcctcctgtctttgccaatttcacccagctgctgactatcagcccactggtggtggccgaggggggcacagcctggcttgagtggaggcatgtgcagcccacgctggacctgatggaggctgagctgcgcaaatcccaggtgctgttcagcgtgacccgaggggcacgccatggcgagctcgagctggacatcccgggagcccaggcacgaaaaatgttcaccctcctggacgtggtgaaccgcaaggcccgcttcatccacgatggctctgaggacacctccgaccagctggtgctggaggtgtcggtgacggctcgggtgcccatgccctcatgccttcggaggggccaaacatacctcctgcccatccaggtcaaccctgtcaatgacccaccccacatcatcttcccacatggcagcctcatggtgatcctggaacacacgcagaagccgctggggcctgaggttttccaggcctatgacccggactctgcctgtgagggcctcaccttccaggtccttggcacctcctctggcctccccgtggagcgccgagaccagcctggggagccggcgaccgagttctcctgccgggagttggaggccggcagcctagtctatgtccaccgcggtggtcctgcacaggacttgacgttccgggtcagcgatggactgcaggccagccccccggccacgctgaaggtggtggccatccggccggccatacagatccaccgcagcacagggttgcgactggcccaaggctctgccatgcccatcttgcccgccaacctgtcggtggagaccaatgccgtggggcaggatgtgagcgtgctgttccgcgtcactggggccctgcagtttggggagctgcagaagcagggggcaggtggggtggagggtgctgagtggtgggccacacaggcgttccaccagcgggatgtggagcagggccgcgtgaggtacctgagcactgacccacagcaccacgcttacgacaccgtggagaacctggccctggaggtgcaggtgggccaggagatcctgagcaatctgtccttcccagtgaccatccagagagccactgtgtggatgctgcggctggagccactgcacactcagaacacccagcaggagaccctcaccacagcccacctggaggccaccctggaggaggcaggcccaagccccccaaccttccattatgaggtggttcaggctcccaggaaaggcaaccttcaactacagggcacaaggctgtcagatggccagggcttcacccaggatgacatacaggctggccgggtgacctatggggccacagcacgtgcctcagaggcagtcgaggacaccttccgtttccgtgtcacagctccaccatatttctccccactctataccttccccatccacattggtggtgacccagatgcgcctgtcctcaccaatgtcctcctcgtggtgcctgagggtggtgagggtgtcctctctgctgaccacctctttgtcaagagtctcaacagtgccagctacctctatgaggtcatggagcggccccgccatgggaggttggcttggcgtgggacacaggacaagaccactatggtgacatccttcaccaatgaagacctgttgcgtggccggctggtctaccagcatgatgactccgagaccacagaagatgatatcccatttgttgctacccgccagggcgagagcagtggtgacatggcctgggaggaggtacggggtgtcttccgagtggccatccagcccgtgaatgaccacgcccctgtgcagaccatcagccggatcttccatgtggcccggggtgggcggcggctgctgactacagacgacgtggccttcagcgatgctgactcgggctttgctgacgcccagctggtgcttacccgcaaggacctcctctttggcagtatcgtggccgtagatgagcccacgcggcccatctaccgcttcacccaggaggacctcaggaagaggcgagtactgttcgtgcactcaggggctgaccgtggctggatccagctgcaggtgtccgacgggcaacaccaggccactgcgctgctggaggtgcaggcctcggaaccctacctccgtgtggccaacggctccagccttgtggtccctcaaggaggccagggcaccatcgacacggccgtgctccacctggacaccaacctcgacatccgcagtggggatgaggtccactaccacgtcacagctggccctcgctggggacagctagtccgggctggtcagccagccacagccttctcccagcaggacctgctggatggggccgttctctatagccacaatggcagcctcagcccccgcgacaccatggccttctccgtggaagcagggccagtgcacacggatgccaccctacaagtgaccattgccctagagggcccactggccccactgaagctggtccggcacaagaagatctacgtcttccagggagaggcagctgagatcagaagggaccagctggaggcagcccaggaggcagtgccacctgcagacatcgtattctcagtgaagagcccaccgagtgccggctacctggtgatggtgtcgcgtggcgccttggcagatgagccacccagcctggaccctgtgcagagcttctcccaggaggcagtggacacaggcagggtcctgtacctgcactcccgccctgaggcctggagcgatgccttctcgctggatgtggcctcaggcctgggtgctcccctcgagggcgtccttgtggagctggaggtgctgcccgctgccatcccactagaggcgcaaaacttcagcgtccctgagggtggcagcctcaccctggcccctccactgctccgtgtctccgggccctacttccccactctcctgggcctcagcctgcaggtgctggagccaccccagcatggagccctgcagaaggaggacggacctcaagccaggaccctcagcgccttctcctggagaatggtggaagagcagctgatccgctacgtgcatgacgggagcgagacactgacagacagttttgtcctgatggctaatgcctccgagatggatcgccagagccatcctgtggccttcactgtcactgtcctgcctgtcaatgaccaaccccccatcctcactacaaacacaggcctgcagatgtgggagggggccactgcgcccatccctgcggaggctctgaggagcacggacggcgactctgggtctgaggatctggtctacaccatcgagcagcccagcaacgggcgggtagtgctgcggggggcgccgggcactgaggtgcgcagcttcacgcaggcccagctggacggcgggctcgtgctgttctcacacagaggaaccctggatggaggcttccgcttccgcctctctgacggcgagcacacttcccccggacacttcttccgagtgacggcccagaagcaagtgctcctctcgctgaagggcagccagacactgactgtctgcccagggtccgtccagccactcagcagtcagaccctcagggccagctccagcgcaggcactgacccccagctcctgctctaccgtgtggtgcggggcccccagctaggccggctgttccacgcccagcaggacagcacaggggaggccctggtgaacttcactcaggcagaggtctacgctgggaatattctgtatgagcatgagatgccccccgagcccttttgggaggcccatgataccctagagctccagctgtcctcgccgcctgcccgggacgtggccgccacccttgctgtggctgtgtcttttgaggctgcctgtccccagcgccccagccacctctggaagaacaaaggtctctgggtccccgagggccagcgggccaggatcaccgtggctgctctggatgcctccaatctcttggccagcgttccatcaccccagcgctcagagcatgatgtgctcttccaggtcacacagttccccagccggggccagctgttggtgtccgaggagcccctccatgctgggcagccccacttcctgcagtcccagctggctgcagggcagctagtgtatgcccacggcggtgggggcacccagcaggatggcttccactttcgtgcccacctccaggggccagcaggggcctccgtggctggaccccaaacctcagaggcctttgccatcacggtgagggatgtaaatgagcggccccctcagccacaggcctctgtcccactccggctcacccgaggctctcgtgcccccatctcccgggcccagctgagtgtggtggacccagactcagctcctggggagattgagtacgaggtccagcgggcaccccacaacggcttcctcagcctggtgggtggtggcctggggcccgtgacccgcttcacgcaagccgatgtggattcagggcggctggccttcgtggccaacgggagcagcgtggcaggcatcttccagctgagcatgtctgatggggccagcccacccctgcccatgtccctggctgtggacatcctaccatccgccatcgaggtgcagctgcgggcacccctggaggtgccccaagctttggggcgctcctcactgagccagcagcagctccgggtggtttcagatcgggaggagccagaggcagcataccgcctcatccagggaccccagtatgggcatctcctggtgggcgggcggcccacctcggccttcagccaattccagatagaccagggcgaggtggtctttgccttcaccaacttctcctcctctcatgaccacttcagagtcctggcactggctaggggtgtcaatgcatcagccgtagtgaacgtcactgtgagggctctgctgcatgtgtgggcaggtgggccatggccccagggtgccaccctgcgcctggaccccaccgtcctagatgctggcgagctggccaaccgcacaggcagtgtgccgcgcttccgcctcctggagggaccccggcatggccgcgtggtccgcgtgccccgagccaggacggagcccgggggcagccagctggtggagcagttcactcagcaggaccttgaggacgggaggctggggctggaggtgggcaggccagaggggagggcccccggccccgcaggtgacagtctcactctggagctgtgggcacagggcgtcccgcctgctgtggcctccctggactttgccactgagccttacaatgctgcccggccctacagcgtggccctgctcagtgtccccgaggccgcccggacggaagcagggaagccagagagcagcacccccacaggcgagccaggccccatggcatccagccctgagcccgctgtggccaagggaggcttcctgagcttccttgaggccaacatgttcagcgtcatcatccccatgtgcctggtacttctgctcctggcgctcatcctgcccctgctcttctacctccgaaaacgcaacaagacgggcaagcatgacgtccaggtcctgactgccaagccccgcaacggcctggctggtgacaccgagacctttcgcaaggtggagccaggccaggccatcccgctcacagctgtgcctggccaggggccccctccaggaggccagcctgacccagagctgctgcagttctgccggacacccaaccctgcccttaagaatggccagtactgggtgtgaggcctggcctgggcccagatgctgatcgggccagggacaggcttgcccatgtcccgggccccattgcttccatgcctggtgctgtctgagtatccccagagcaagagagacctggagacaccaggggtggagggtcctgggagatagtcccaggggtccgggacagagtggagtcaagagctggaacctccctcagctcactccgagcctggagaactgcaggggccaaggtggaggcaggcttaagttcagtcctcctgccctggagctggtttgggctgtcaaaaccagggtaacctcctacatgggtcatgactctgggtcctgggtctgtgaccttgggtaagtcgcgcctgacccaggctgctaagagggcaaggagaaggaagtaccctggggagggaagggacagaggaagctattcctggcttttccactccaacccaggccaccctttgtctctgccccagagttgagaaaaaaacttcctcccctggttttttagggagatggtatcccctggagtagagggcaagaggagagagcgcctccagtctagaaggcataagccaataggataatatattcagggtgcagggtgggtaggttgctctggggatgggtttatttaagggagattgcaaggaagctatttaacatggtgctgagctagccaggactgatggagcccctgggggtgtgggatggaggagggtctgcagccagttcattcccagggccccatcttgatgggccaagggctaaacatgcatgtgtcagtggctttggagcaggttaggctggggctcatcgagggtctcaggccgaggccactgcggtgccagtgcccccctgaggactagggcaggcagctgggggcacttggttccatggagcctggataaacagtgctttggaggctctggacagctgtgtggtgtttgtgtcttaactatgcactgggcccttgtctgcgtcggcttgcatacagagggcccctggggtcggccctccggcctggcctcagccagtgggatggacagggccaggcaggcctctgaacttccacctcctggggcctcccagacctcctgtgcccccacctgtgtgggcaggtgggccagtcttcgggtgatgggaccaaaccccttcagttcagtagagaaaggctaggtcctctacaaagagctgcaagacaaaaattaaaataaatgctccccaccct

SEQ ID NO: 199 - DNA, 2505 bp, Homo sapiens
gccgtccttacccccaggactcggccccatggagacgccgccggccgccgctggcgcatggcggggagctgtggcgcggggccttccaggagtctgagctatgagtggcccctgtggagagaagcctgtcctggaagccagccccaccatgagtctgtgggaatttgaggacagccacagccgtcagggcaccccaaggccgggtcaagagctggccgctgaggaggcctcggccctggaactgcagatgaaggtggacttcttccggaagctgggctattcatccacggagatccacagcgtcctgcagaagctgggcgtccaggcagacaccaacacggtgctgggtgagctggtgaaacacgggacagccaccgagcgggagcgccagacctcaccggacccctgccctcagctccctctagtcccgcggggtggtggcacccctaaggctcccaacctggagcctccactcccagaagaggaaaaggagggcagcgacctgagaccagtggtcatcgatgggagcaacgtggccatgagccatgggaacaaggaggtcttctcctgccggggcatcctgctggcagtgaactggtttctggagcggggccacacagacatcacagtgtttgtgccatcctggaggaaggagcagcctcggcccgacgtgcccatcacagaccagcacatcctgcgggaactggagaagaagaagatcctggtgttcacaccatcacgacgcgtgggtggcaagcgggtggtgtgctatgacgacagattcattgtgaagctggcctacgagtctgacgggatcgtggtttccaacgacacataccgtgacctccaaggcgagcggcaggagtggaagcgcttcatcgaggagcggctgctcatgtactccttcgtcaatgacaagtttatgccccctgatgacccactgggccggcacgggcccagcctggacaacttcctgcgtaagaagccactcactttggagcacaggaagcagccgtgtccctatggaaggaaatgcacctatgggatcaagtgccgattcttccacccagagcggccaagctgcccccagcgctctgtggcagatgagctccgtgccaatgctctcctctcaccccccagagccccaagcaaggacaaaaatggccggcggccttcaccttcatcccagtccagctctctgctaacagagagtgagcagtgcagcctggatgggaagaagctgggggcccaggcatccccagggtcccgccaagagggtctaacacagacctatgccccatcaggcaggagcctcgcacctagcgggggcagtggcagcagctttgggcccacagactggctcccacagacgctggactcactcccgtacgtctcccaggattgcctggactcgggcattggctccctggagagccagatgtcggaactttggggggttcgaggaggaggccctggtgagccgggcccaccccgagccccttacacgggctacagtccctatggatctgagctcccagccaccgcagccttctctgcctttggccgggccatgggtgctggccacttcagtgtccctgccgactacccacccgcgccccctgcctttccacctcgagagtactggtctgaaccatacccactgcccccacccacatcagtccttcaggagcccccagtgcagagcccaggggctggcaggagcccgtggggcagggcaggcagcctggccaaggagcaggccagcgtgtatactaagctgtgtggtgtgtttcccccgcacctggtggaggctgtgatggggcgcttcccacagctcctggacccccagcagctggctgccgagatcctctcctacaagtcccagcaccccagtgagtaagctgcctgtggctggcaagggcagcacccccagcctccaagggccgtcaggctgggctttgggccattgagcagcccattcccagccctgaggcccaccccagaggctggacagagggaggattcaagtcgggaaggaaacccacaaaccaaagatactgtaggattggttctggcccatgcagcacctctagctgtctgcctcagtgggtcagaagcgatcaccctgttgatacacattgtatctctgtagtttaaggagacgctgccggtaacggcgtcggtccgtggctgaggcccaaaccgtcttttctctcagagggtggggagggaggtgggggcagcagaggcctgggctgggtgccctgtgcacgccaccccacttccgccctacccctgggacgttggccttggctggctagttgggcaccgtgtgcctgccctccaagggcctcctctacgccaatgaggcctcatctgtgctctcgctgggcacgtggcttcatgtcagtaagcaagatgcttcttaataacccaccttctgccccactctattccttatcctgctgcccctgtaggggtcaagggccctccgtctacaccctc

SEQ ID NO: 200 - DNA, 2451 bp, Homo sapiens
atggtatattcccggagaggaagtctgggatcccggctcctgctgctctggcttctccttgcctactggaaggcagggagcggccagctccactactcgatcccggaggaagccaaacacggaaccttcgttggccgcatcgcgcaggacctagggctggagctggcggagctggtgccgcgcctgttccgggtggcgtccaagggccgcggggaccttctggaggtaaatctgcagaatggcattttgtttgtgaattctcggatcgaccgggaggagctgtgccggcggagggcggagtgcagcatccacctggaggtgatcgtggacaggccgctgcaggttttccatgtggaggtggcagtgaaggacatcaatgacaatccgcccaggttctccagacaagaacaaagattattcattttagagtcaagaatgccagattcgcggtttccgctagagggcgcgtcggatttggatattggagcaaatgcacaattgagatacaggttaaatccaaacgaatattttgacttagatgttaaaacaaatgaagaagaaacgaactttttagagctggttttgaggaaatccttagatagagaagaaacacaagaacaccgtttattagtgattgcaactgatggaggaaaacccgaactaacaggtacagttcagttgttgatcaatgtattggatgctaatgataacgccccagaatttgataaatccatttataatgtcagattgttggaaaatgcaccaagtgggacattagttattaaactgaacgcctcagatgcagatgagggcatcaataaggaaatagtgtatttctttagtaatcttgttcttgacgatgtaaagtccaaatttataattaattctaatactggtgaaataaaagttaacggggaactggattatgaagactataactcatatgaaattaatattgatgccatggataaaagtacattcccattatcaggacactgtaaagtagtagtgaaactcctggatgtgaatgataataccccagagatggccataaccacccttttcctgcctgtcaaagaggacgctccactcagcacggtcattgctctgatcagcgtgtctgaccgtgactcaggtgccaacgggcaggtgacctgctccctaatgccccacgttcccttcaagctggtgtccaccttcaagaattactactcgttggtgctggacagcgccctggaccgcgagagcgtgtcggtctatgagctggtggtgaccgcgcgggacgggggctcgccttcgctgtgggccaccgccagcgtgtctgtggaagtggccgacgtgaacgacaacgctccggcgttcgcgcagccccagtataccgtgttcgtgaaggagaacaacccgccaggctgccacatcttcacggtgtctgcacgggacgcggacgcgcaggagaacgccctggtgtcctactcgctggtggagcggcgggtgggcgagcgcccgctgtcgagttacgtttcggtgcacgcggagagcggcaaggtgtacgcgctgcagccgctggaccacgaggaagtggagctgctgcagttccaggtgagcgcgcgcgacgcgggcgtgccgcctctgggcagcaacgtgacgctgcaggtgttcgtgctggacgagaacgacaacgcgccggcgctgctggtgcctcgagtgggtggcaccggcggcgcagtgagcgagctggtgccgaggtcagtgggtgcgggccacgtggtggcgaaggtgcgcgcagtggaccctgattcgggctacaacgcttggctttcgtatgagctgcagccagcgcctggcagtgcgcgcatcccgttccgcgtggggctgtacacaggcgagatcagcacaacacgctctctggatgagaccgaagcaccgcgccaccgccttctggtgctggtgaaggaccatggagagcccccgctgacagccacagccacagtgctggtgtcgctggtggaaagtggccaggcgccgaaggcctcatcgcgggcgtcggcgggcgctgtgggtcccgaggctgccctggtggatgtcaacgtgtacctgatcatcgccatctgtgcggtgtccagcctgctggtgctcacgctgctgctgtacaccgcgctgcggtgctcggcgcagcccaccgaggccgtgtgcacacggggcaagcccactctgttgtgctccagcgcggtggggagctggtcgtactcgcagcagaggagacagagggtgtgctctggggaagctccacccaaaacagacctcatggccttcagtccaagccttcctcagggtcccacctctacagacaacgtgagttttctaatattaacatccatctttccctcccaattttcaaatattaaatgtcacattcacccactttttttgtatttaaaaattatgtcttag

SEQ ID NO: 201 - DNA, 1949 bp, Homo sapiens
atgacgcgagaccccgcccccgcagcgcccgcttccaagatggcggcagcgatgcctgcccggctgttggggtggcggtgacgacaggcagcaaaagaccagctggtcccagattcgctgctggagtgctggatggagcctttctctgccctctgtgacatttccaattttagataatgcctcacatctctgtccccccgggaccccctggagcccccatgatccctaagaagacagcttgaacctagatctcacccccaggatgttgcggaggctgctggagcggccttgcacgctggccctgcttgtgggctcccagctggctgtcatgatgtacctgtcactggggggcttccgaagtctcagtgccctatttggccgagatcagggaccgacatttgactattctcaccctcgtgatgtctacagtaacctcagtcacctgcctggggccccagggggtcctccagctcctcaaggtctgccctactgtccagaacgatctcctctcttagtgggtcctgtgtcggtgtcctttagcccagtgccatcactggcagagattgtggagcggaatccccgggtagaaccagggggccggtaccgccctgcaggttgtgagccccgctcccgaacagccatcattgtgcctcatcgtgcccgggagcaccacctgcgcctgctgctctaccacctgcaccccttcttgcagcgccagcagcttgcttatggcatctatgtcatccaccaggctggaaatggaacatttaacagggcaaaactgttgaacgttggggtgcgagaggccctgcgtgatgaagagtgggactgcctgttcttgcacgatgtggacctcttgccagaaaatgaccacaatctgtatgtgtgtgacccccggggaccccgccatgttgccgttgctatgaacaagtttggatacagcctcccgtacccccagtacttcggaggagtctcagcacttactcctgaccagtacctgaagatgaatggcttccccaatgaatactggggctggggtggtgaggatgacgacattgctaccagggtgcgcctggctgggatgaagatctctcggccccccacatctgtaggacactataagatggtgaagcaccgaggagataagggcaatgaggaaaatccccacagatttgacctcctggtccgtacccagaattcctggacgcaagatgggatgaactcactgacataccagttgctggctcgagagctggggcctctttataccaacatcacagcagacattgggactgaccctcggggtcctcgggctccttctgggccacgttacccacctggttcctcccaagccttccgtcaagagatgctgcaacgccggcccccagccaggcctgggcctctatctactgccaaccacacagccctccgaggttcacactgactcctccttcctgtctaccttaatcatgaaaccgaattcatggggttgtattctccccaccctcagctcctcactgttctcagagggatgtgagggaactgaactctggtgccgtgctagggggtaggggcctctccctcactgctggactggagctgggctcctgtagacctgaggggtccctctctctagggtctcctgtagggcttatgactgtgaatccttgatgtcatgattttatgtgacgattcctaggagtccctgcccctagagtaggagcagggctggaccccaagcccctccctcttccatggagagaagagtgatctggcttctcctcggacctctgtgaatatttattctatttatggttcccgggaagttgtttggtgaaggaagcccctccctgggcattttctgcctatgctggaatagctccctcttctggtcctggctcagggggctgggattttgatatattttctaataaaggactttgtctcgc

SEQ ID NO: 202 - DNA, 1375 bp, Homo sapiens
cggtggcggtggcggcggcggcggcggcgcgtggcaggtccggcgggcgcgaggcggcggcggaggcccgagcccggcccagcctcgtcccgcccggagcccgcctggctgctaccccgaccccggctccggtcccgtcctgtcccggcgcgccgcggcctcgccccggcccccgctcggcgcctcccgagggagcggcgctgccggccgagagcgcaggcccggccatgaccgacttcaaattgggtatcgtgcggctcggccgggtggccgggaagaccaaatacacgctgatcgatgagcaggacatcccgctggtggagagctactcctttgaggcccgaatggaagtggatgcagatggaaatggtgctaagatatttgcctatgcctttgacaagaaccgaggaaggggctctgggagactccttcatgagctgctgtgggagcggcaccgggggggcgtggccccgggcttccaggtggtgcacctcaacgctgtgaccgtggacaatcgcctggacaacctgcaactggtgccgtggggctggcggcccaaggctgaagagacctccagcaagcagagggagcaaagcttgtattggcttgcaattcagcagctgcctacagaccctatagaagaacagtttcctgtcctaaatgtgacccggtattataatgccaacggggatgtagtggaagaggaggagaactcttgcacctactatgagtgccactaccctccctgcacagtgattgagaagcagctccgggagttcaacatctgtgggcgctgccaggtggcccggtactgcggctcccagtgccagcagaaggactggcctgcccacaagaagcactgtcgggagaggaagcgtcccttccagcatgagcttgagccagagcgatgacgggcaggggagccacacatactcacagcccccgggctctaccctgggcacagcagagacagactggtggttgaacctggaggtgccaaaaaagccagctgcgggcccaggacagctgccgtgagactcccgatgtcacaggcagtctgtgtggttacagcgcccctcagtgttcatctccagcagagacaacggaggaggctcccaccaggacggttctcattatttatatgttaatatgtttgtaaactcatgtacagttttttttgggggggaggcaatgggaagggtagaaattacaaatagaatcatttgctgtaatccttaaatggcaaacggtcaggccacgtgactaaaaactgtcctgttgtcgaagcttctcccctgggccgccgggagccccgtggagcgcggcctgcacgggagttgtgtccacaaaggcaaagtaaaggggtggaatcatc

SEQ ID NO: 203 - DNA, 3950 bp, Homo sapiens
cggagggaccgggcgggagagagagaaagcctgaccgaccggctggcgaagagctgcatgcaaccggtgggaggccgggccggctgggtctggggctcgggctcaggctcgcaccgtttctcggcaggtccctggcggtgagcgcggacggcccggaggcggcggctctgagctggcaggcggagggctgtctcctgcgcccgcctgcccggcgcggtccgaggatgcgggggggcgatgcccggggccagggacgcgctctgtcaccaggcgctgcagctgctggccgagctctgtgcccgtggggccctggagcacgacagctgccaggatttcatttaccacctgcgggaccgtgccagaccccggctccgcgacccagatatctcagtgagcctgctgacccttgtggtcactgcctgtggtctcgctctctttggcgtgtctctcttcgtatcttggaaactctgctgggttccgtggcgagaacgaggcctgccctctggtagcaaagacaacaaccaggagccccttaactacatggacacagagaccaatgagcaggagaacagtgaggacttcctagatcctcccacgccctgccctgactcctccatgaagatcagccacacctcccctgacattcccctctccacccagacggggatccaggagaactgtgcccatggcgtccgcgtgcagcgccaagtcacagagccaacctcgtcggcccggcataattcaatccgaagacaactcaacttgtcaaacccggacttcaatatccagcagcttcaaaaacaggaacagttgactggaattggtagaattaaaccagagttatataagcagaggtcattggataatgatgacgggagacggagtaacagcaaggcttgtgggaaactgaacttcattttaaaatatgactgtgacttagagcagctcatagtgaagattcacaaagctgtcaatttgcccgccaaggacttttctgggacttcagatccttatgtcaagatctatttgcttcctgatcggaaaacaaaacaccagactaaagttcacagaaagaccctgaaccctgtgtttgatgaagtgtttttatttccggttccctacaatgaccttgaagcacggaagcttcacttctctgtgtacgactttgacaggttctctcgtcatgacttaatcggccaagtggtggtggatcacttcctagacttggctgatttccccagggagtgcatcctttggaaggatatcgaatatgtcaccaatgacaacgtggatctgggagagctgatgttttccctgtgctatcttccaacggctggcaggctgaccattaccattataaaagcaaggaatttaaaggcaatggacataacaggagcatcagatccctatgtgaaagtctcgctgatgtgtgatggcagacgactgaagaagaggaaaacatccaccaagaggaacaccttgaatcctgtttacaacgaagccatagtctttgatgtccctcccgagaacattgaccaaatccacttgtccatagcagtcatggactatgaccgtgtaggtcacaatgagatcatcggcgtgtgtcaagtaggcaacgaggctgagaggctgggcagagaccactggagtgaaatgttgtcatatcctcggaagcccattgcacactggcattccctggtggagaaacgatgaccatgggtaagaggactgcttgtgccaaggacaaaataggacaaccatctcacaaagatcttaagtaactttttccatccagcaacatccagacgatttcagtgaccaaatgctcagctgtaaccacagcactaactggccttctttccagattgggtttggtgaacctgaatggtccagccaccttctgcaggtggcccaaggtgatgtgctgcagggaagcatgtctctcatgccaagaaccaagatcggactatgaacaaaaacaaatgatagatatagtgacagtaccaagagtaccaggactcaatgtttcatatgaagcccttggtgatgaggacatagcatctgccctggaaatcgttattccaacataatattattttctagaatgccctggaaggacagaatatttaaaaatatatccaggtgctaaataggcagcagatctcaattcacacatgactacctttgagctaatgactgtctccagaaaataactgtgccccaagaagtgctccagatttgcaaggaatagccccaagagaataccaagacaagcaggctgttccctggaaaaaatctaatgcaaggagggctagttcacagcaaattcactgcctcctcccatgcacgtggtagagagtaccagtatcaacatggccctgttttctgctaaaaccagattttgaggaatcagagacccccaacactactcactcagtagctagcagccccttcctttcaactgggagtgttattagaatgaaaagtaattagttagaagggcatacatctcagtggcatgagcattgtggaatatcctttcctaggcacattcgtccactaagggaacagcctcagaaactggtacagcaatgggtgagatgagatcatggagagagaacacagccatcccctatagaaaggcacagcttttgggcttctctggcctgaatgccttctggggtatttccatatgcaacagcccagagtcatagccttgggcaaccacacatagaggtttccttctcacttcagacacatacatcactttcacaccacttggggatggaaatacctacaagagtgaaggtcaagggccctccccaggcatctcattcattactcagcttccttcctgaccaagtctgccaaccaatggccagctatgcgcctcatcctcattgcttctgcctccacgtaaatgaaaccaaaggcctcagcatatcctgggaggactgggggctgttacctaatggtcctctctgtcccattataggtgcaaggcaccccatccacacatttgcaccactactccaagatagtatttttcttttcacacaatctctttacagcagaatccagagttggattgtagtttaccttcctggaaagctcattatctctgtttgaattaacatttcagcatggaactaactgggcggaggaaggatcgttatacgtcttcagaaagttctcattgccccagctgcctagtactatacaagaagctctactttgatggcagatctaagaaggctataggcctttgtttgtaggaagcagtgtcattacattcaagcttcacttctctgattggcttccaaccactgggattcaaagagaatccaaggttctgcctatgtctgatgacataaggaaaacttggcttcctctgctcaaggttcccctctgctcatccctcctcattcagacatcctccaccataccagtgtttagaagcaaaacatgaagggctagcgccaccaggatagttagcagaaatattgtctgtaaagctaggcagatgagcccagaagaatggtcccagagaaagcagactggctccaatagatatcaggcagcaatcccaataaattctgacatgtccttggcaatggaagcctgggttggagatcctgaggcagctgtgcctactgttccccacctcagaagcttcctgcccagagagccagcagccttgggatactaatgaggatgcaactggcttattggtatgaaatagaaggtggctttgtaggggcaagcaggcaaagagtactatccacatggcaggcaggtggctttgtgtctggaaagctttgcctagccagtacagctgtgagcagaggctggttataaatttgaactccctcagcccatttgcaactctgcctctgttctcttgcattctgtttggttgccctttagtttcctagtaaatgctccttttg

SEQ ID NO: 204 - DNA, 2362 bp, Homo sapiens
cgtcccggcgccactcggcccagggcagggaccccgccacggccgggaccgcccggcccggccccagcccgcgcctctccgcgccgccccgcgctccgcaccgcgccctctccgcgtccccgcccgcgcggccggaccgggcagccagaaaaatcatttttcttctctgggaaggtgaacatttgtagcattgatttcccggatctggtaacatggcaaaagatgccggtctaattgaagccaacggagaactcaaggtcttcatagaccagaaccttagtcccgggaaaggcgtggtgtccctcgtggccgttcacccctccaccgtcaacccgctcgggaagcagctcttgccaaaaacctttggacagtccaatgtcaacattgcccagcaagtggtaattggtacgcctcagagaccggcagcgtcaaacaccctggtggtaggaagcccacacacccccagcactcactttgcctctcagaaccagccttccgactcctcaccttggtctgccgggaagcgcaacaggaaaggagagaagaatggcaagggcctacggcatttctccatgaaggtctgcgagaaggtgcagaggaaagggaccacttcctacaacgaagtggcagacgagctggttgcggagttcagtgctgccgacaaccacatcttaccaaacgagtcagcttatgaccagaaaaacataagacggcgcgtctacgatgccttaaacgtgctaatggccatgaacatcatctccaaggagaagaaggagatcaagtggattggtctgcccaccaactcggctcaggaatgtcagaacttagaggtggaaagacagaggagacttgaaagaataaaacagaaacagtctcaacttcaagaacttattctacagcaaattgccttcaagaacctggtgcagagaaaccggcatgcggagcagcaggccagccggccaccgccacccaactcagtcatccacctgcccttcatcatcgtcaacaccagcaagaagacggtcatcgactgcagcatctccaatgacaaatttgagtatctgtttaattttgacaacacatttgaaatccacgatgacatagaagtgctgaagcggatgggcatggcttgcgggctggagtcggggagctgctctgccgaagaccttaaaatggccagaagtctggtccccaaggctctggagccatacgtgacagaaatggctcagggaactgttggaggcgtgttcatcacgacggcaggttccacgtctaacggcacaaggttctctgccagtgacctgaccaacggtgcagatgggatgctggccacaagctccaatgggtctcagtacagcggctccagggtggagactccggtgtcctacgtcggggaggacgacgaggaggacgatgacttcaacgagaatgacgaggacgactgacgtcctccccacttcagattcggcttcaggaaaacgtttagcgaaaagaaactttttttttaatgtgggttttctgtttccttttggcctactcccaagaagatattggtaagctattgaatttagatatgcacctctgataagcaaggattgtttcccgtaggattaggacgtgctgtggatgtgtgttttgataccagtgtgctgatgcagagcgtttatttacttgttaggattttgtgttttcatttgctatttttctttaagtgcagagttcatttttgcccctgaaaagtttttgctgagtttgctgaagaaattgtatttcaaccacatccatgaaaataaaacacctcctgttgtggatggtgagcccctgatgccgcttatttgccgtgagtttggacggcacccctgctggcggatagcaagactctgtggagtttgttcagtggtacggtgtccaagcaaacagcagaatgcaactttctaaacagccccaagcaaacagcagaattcaactttttaaacaataaacaccatcaaccttattgactttattgtcccttaaattatattgactgttgtgattccatcaagtttgtacactcttttctctccctgttttgcagcaacaaattgcgaagtgcttttgtttgtttgttttcgtttggttaaagcttattgccatgctggtgcggctatggagactgtctggaaggcttggaatggtttattgcttatggtaaaatttgcctgatttcttacaggcagcgtttggaaaccttttattatatagttgtttacatacttataagtctatcatttaaagacatgtactgaaacaaatgtatttgtttcataagcatcttcctgtaatctattataaaattgaaattaaatatagagaatgtttt

SEQ ID NO: 205 - DNA, 3955 bp, Homo sapiens
gggtaaagctcctcggcctcggcgtgctgcgcctccgcggctgccctgcgccagaattcggttccctcaaaattataaaggcaggaaagctcaagacaaagaaatccaacaaggctagtgatttcagtgatatggagaattggccaacaccaagtgaattagtgaacactggatttcagagcgtcctcagccaaggaaataaaaagccacaaaatagaaaagaaaaagaagagaaggttgaaaagagaagtaacagtgacagcaaagaaaaccgggaaacaaaattaaatggtcctggtgaaaacgtcagtgaggatgaggctcagtcaagtaatcaacgtaagagagctaataagcacaagtgggtaccactccacttagatgttgtaagatcagagagtcaagaaagacctggatcccggaacagctcaagatgtcaacctgaagcaaataaaccaacacataacaataggagaaatgatacacgaagttggaagcgagatagagaaaaaagggatgatcaagatgacgtttccagtgtgagaagtgagggtggtaatatccgaggttcctttagaggtcgaggaagaggccgaggacggggaagaggacgaggcagaggaaatcctcgattgaactttgattattcatatggttatcaagaacatggtgaaaggactgatcaaccatttcaaacagaacttaataccagtatgatgtattactatgatgatggtacaggtgtacaggtgtatcctgtggaagaagcattgcttaaagagtatattaagcgtcaaattgaatattacttcagtgtagaaaatttggaacgagacttctttcttcggggaaagatggatgaacaaggtttcttgcctatttccctgattgctggttttcagcgtgttcaggctctcactacaaaccttaatctcatcttagaggcactgaaggatagcacagaagtagaaattgtggatgagaaaatgagaaaaaagatagaaccagaaaaatggccaattccaggccctcctccacgcagtgtgccaccaacagacttctctcaactgattgattgtccagagtttgtaccaggccaagccttttgctcacatacagagtctgccccaaattctccaagaattggaagcccattgagcccaaagaaaaacagtgaaacaagtattcttcaagcaatgtctagaggtttgtctaccagtttgcctgacttggactcagaaccttggatagaagttaaaaaaagacatcagccagccccagtgaaattgagggaatcagtgtctgtccctgaagggtcattaaatcagctatgttcttcagaagaaccagaacaagaagaacttgattttttgtttgatgaagagattgaacaaataggacgaaaaaacacatttactgattggtctgataatgattcagattatgaaattgatgaccaagacttaaacaagattttgattgtaactcagacaccaccttatgtgaaaaaacatcctggaggagatcgaacaggcacccacatgtctcgggcaaaaatcacatctgaacttgctaaagttatcaatgatggcttatactattatgaacaggatctatggatggaagaagatgaaaacaaacacacagccataaagcaagaagttgagaactttaagaagctaaatctcattagtaaagagcagtttgaaaacctaacacctgaacttccttttgagccaaaccaagaagttcctgtagcaccttcacagtccaggcaaggaggtgttcaaggagtgcttcacattcccaagaaagatttgactgatgaattagctcagaagttatttgatgtttcagaaataacttcagcagcaatggttcattcgttgcctacagcagttccagaatctcctagaattcatcctacaagaacacccaaaacacctcgaacacctaggttacaagatcctaacaaaacaccaagattttatcctgttgttaaagaaccaaaagccattgatgtaaagagtccaagaaagagaaaaacaaggcatagcacaaatccccctctagagtgtcatgttggttgggtaatggattccagagaccgtgggccaggaacatcctctgtcagcacttcaaatgcttcaccttcagaaggcgcaccactagcaggaagttatggatgtactcctcattcattcccaaagttccagcatccttctcatgaacttttgaaggaaaatggctttacccaacaagtgtaccacaagtatcgtcgaagatgcctaagtgagagaaaacgcttgggaattggtcagtcccaagaaatgaataccctctttcgtttctggtcctttttcctcagagatcacttcaataaaaaaatgtatgaggaatttagacaacttgcttgggaagatgcaaaagaaaattacaggtatgggttagaatgtctgttcaggttttatagttatggactggaaaaaaaattcaggcgagaaatttttcaggatttccaagaagaaaccaaaaaagactacgaatctggtcagctgtatggactagaaaagttttgggcttatttgaaatattctcaatctaagacacagtctattgacccaaaacttcaggaatacctctgtagttttaagaggttagaagacttccgtgttgatccccctattagtgatgaatttggaagaaaaagacattcctctacttctggtgaggagagtaatcgtcatagacttccacctaattcctctacaaagccaccaaatgctgctaaacctacatctaccagtgagcttcaggtaccaataaactctcccagaaggaatatttcaccggagtccagtgacaattcacattaaacagtgctgcctgtgtcctgtggtctcaagaaatggtgaaatgcctgagaaatagactcttatgaaagttctttgtccttgaagtcaacatttacatcagtatttatttggggaaaatcttctggtgtttaattgtgataataagaaagaagaaaaagaaagaaaagtggtagcattttttctaacaagataaattctaaaaatgttttccctgatttcacaaacaaggatagtcttggtgaccttttatagagatcttctagtaatgtattttgatctcagatttctttttcaaagccatggttttacaaaaacagcattccttaaatatatttaaaaaacaatacaaggaatgcctaacatttcagctcatacttcttaaagaagatatagtatgttgtattctcttcttagagctttcttaaagaatccacaatccaattaccccactgtcaattcatatttgaacttaccaaaacaaaggaggattacgtatatgttttttaaattcaaaaaagaatatgaaattatacctttagtatccctttgagacatatagtttaaagaaaactttttttaaaacaaaagtaggaatatatagtaagattgtagttacaatgagtatatgcacttttgatgctaggttttgcttttctccccccagtcatatctcatgatttccacagttgttgtattggtgtggagttttctgaattggctataagctgattacatattagaggtttatttttatgattctatataaacgtgcacgagtaatttaaaacctgcattgggattgattggaatattgtcctaaattaattaaatcttgcactgttttgaatgcatctgctatttatacatctgcaagtgggtatgtcataaggagtcagattatctttaatttaaaatgaatacttagttttacctttttgtttattttttgtttaattttgtttttataaatgttttcaagagttatagcaaattgatttctaatttttattgctattacaactgatgtaaatggtagtttcagtttttgtgagatttaaaaaaataaagcacttattctg

SEQ ID NO: 206 - DNA, 2200 bp, Homo sapiens
caagccatagcaggaaacagcgagcttgcagcctcaccgacgagtctcaactaaaagggactcccggagctaggggtggggactcggcctcacacagtgagtgccggctattggacttttgtccagtgacagctgagacaacaaggaccacgggaggaggtgtaggagagaagcgccgcgaacagcgatcgcccagcaccaagtccgcttccaggctttcggtttctttgcctccatcttgggtgcgccttcccggcgtctaggggagcgaaggctgaggtggcagcggcaggagagtccggccgcgacaggacgaactcccccactggaaaggattctgaaagaaatgaagtcagccctcagaaatgaagttgactgcctgctggctttctgttgactggcccggagctgtactgcaagacccttgtgagcttccctagtctaagagtaggatgtctgctgaagtcatccatcaggttgaagaagcacttgatacagatgagaaggagatgctgctctttttgtgccgggatgttgctatagatgtggttccacctaatgtcagggaccttctggatattttacgggaaagaggtaagctgtctgtcggggacttggctgaactgctctacagagtgaggcgatttgacctgctcaaacgtatcttgaagatggacagaaaagctgtggagacccacctgctcaggaaccctcaccttgtttcggactatagagtgctgatggcagagattggtgaggatttggataaatctgatgtgtcctcattaattttcctcatgaaggattacatgggccgaggcaagataagcaaggagaagagtttcttggaccttgtggttgagttggagaaactaaatctggttgccccagatcaactggatttattagaaaaatgcctaaagaacatccacagaatagacctgaagacaaaaatccagaagtacaagcagtctgttcaaggagcagggacaagttacaggaatgttctccaagcagcaatccaaaagagtctcaaggatccttcaaataacttcaggctccataatgggagaagtaaagaacaaagacttaaggaacagcttggcgctcaacaagaaccagtgaagaaatccattcaggaatcagaagcttttttgcctcagagcatacctgaagagagatacaagatgaagagcaagcccctaggaatctgcctgataatcgattgcattggcaatgagacagagcttcttcgagacaccttcacttccctgggctatgaagtccagaaattcttgcatctcagtatgcatggtatatcccagattcttggccaatttgcctgtatgcccgagcaccgagactacgacagctttgtgtgtgtcctggtgagccgaggaggctcccagagtgtgtatggtgtggatcagactcactcagggctccccctgcatcacatcaggaggatgttcatgggagattcatgcccttatctagcagggaagccaaagatgttttttattcagaactatgtggtgtcagagggccagctggaggacagcagcctcttggaggtggatgggccagcgatgaagaatgtggaattcaaggctcagaagcgagggctgtgcacagttcaccgagaagctgacttcttctggagcctgtgtactgcggacatgtccctgctggagcagtctcacagctcaccatccctgtacctgcagtgcctctcccagaaactgagacaagaaagaaaacgcccactcctggatcttcacattgaactcaatggctacatgtatgattggaacagcagagtttctgccaaggagaaatattatgtctggctgcagcacactctgagaaagaaacttatcctctcctacacataagaaaccaaaaggctgggcgtagtggctcacacctgtaatcccagcactttgggaggccaaggagggcagatcacttcaggtcaggagttcgagaccagcctggccaacatggtaaacgctgtccctagtaaaaatacaaaaattagctgggtgtgggtgtgggtacctgtattcccagttacttgggaggctgaggtgggaggatcttttgaacccaggagttcagggtcatagcatgctgtgattgtgcctacgaatagccactgcataccaacctgggcaatatagcaagatcccatctcttt

SEQ ID NO: 207 - DNA, 3047 bp, Homo sapiens
cacccgaaggcgtccgggaatcttcactttttccgttgctagcagtggaagggtcacagaccaaacactaaggcctgagcggtgacaaccgaggcgagatgatggtcaacagggaatgcctcgtgggagaaaaaagacaattttattctcagcgctgattttgagatgatgggcttgggaaacgggcgtcgcagcatgaagtcgccgcccctcgtgctggccgccctggtggcctgcatcatcgtcttgggcttcaactactggattgcgagctcccggagcgtggacctccagacacggatcatggagctggaaggcagggtccgcagggcggctgcagagagaggcgccgtggagctgaagaagaacgagttccagggagagctggagaagcagcgggagcagcttgacaaaatccagtccagccacaacttccagctggagagcgtcaacaagctgtaccaggacgaaaaggcggttttggtgaataacatcaccacaggtgagaggctcatccgagtgctgcaagaccagttaaagaccctgcagaggaattacggcaggctgcagcaggatgtcctccagtttcagaagaaccagaccaacctggagaggaagttctcctacgacctgagccagtgcatcaatcagatgaaggaggtgaaggaacagtgtgaggagcgaatagaagaggtcaccaaaaaggggaatgaagctgtagcttccagagacctgagtgaaaacaacgaccagagacagcagctccaagccctcagtgagcctcagcccaggctgcaggcagcaggcctgccacacacagaggtgccacaagggaagggaaacgtgcttggtaacagcaagtcccagacaccagcccccagttccgaagtggttttggattcaaagagacaagttgagaaagaggaaaccaatgagatccaggtggtgaatgaggagcctcagagggacaggctgccgcaggagccaggccgggagcaggtggtggaagacagacctgtaggtggaagaggcttcgggggagccggagaactgggccagaccccacaggtgcaggctgccctgtcagtgagccaggaaaatccagagatggagggccctgagcgagaccagcttgtcatccccgacggacaggaggaggagcaggaagctgccggggaagggagaaaccagcagaaactgagaggagaagatgactacaacatggatgaaaatgaagcagaatctgagacagacaagcaagcagccctggcagggaatgacagaaacatagatgtttttaatgttgaagatcagaaaagagacaccataaatttacttgatcagcgtgaaaagcggaatcatacactctgaattgaactggaatcacatatttcacaacagggccgaagagatgactataaaatgttcatgagggactgaatactgaaaactgtgaaatgtactaaataaaatgtacatctgaagatgattattgtgaaattttagtatgcactttgtgtaggaaaaaatggaatggtcttttaaacagcttttggggggtactttggaagtgtctaataaggtgtcacaatttttggtagtaggtatttcgtgagaagttcaacaccaaaactggaacatagttctccttcaagtgttggcgacagcggggcttcctgattctggaatataactttgtgtaaattaacagccacctatagaagagtccatctgctgtgaaggagagacagagaactctgggttccgtcgtcctgtccacgtgctgtaccaagtgctggtgccagcctgttacctgttctcactgaaaagtctggctaatgctcttgtgtagtcacttctgattctgacaatcaatcaatcaatggcctagagcactgactgttaacacaaacgtcactagcaaagtagcaacagctttaagtctaaatacaaagctgttctgtgtgagaattttttaaaaggctacttgtataataacccttgtcatttttaatgtacaaaacgctattaagtggcttagaatttgaacatttgtggtctttatttactttgcttcgtgtgtgggcaaagcaacatcttccctaaatatatattaccaagaaaagcaagaagcagattaggtttttgacaaaacaaacaggccaaaagggggctgacctggagcagagcatggtgagaggcaaggcatgagagggcaagtttgttgtggacagatctgtgcctactttattactggagtaaaagaaaacaaagttcattgatgtcgaaggatatatacagtgttagaaattaggactgtttagaaaaacaggaatacaatggttgtttttatcatagtgtacacatttagcttgtggtaaatgactcacaaaactgattttaaaatcaagttaatgtgaattttgaaaattactacttaatcctaattcacaataacaatggcattaaggtttgacttgagttggttcttagtattatttatggtaaataggctcttaccacttgcaaataactggccacatcattaatgactgacttcccagtaaggctctctaaggggtaagtaggaggatccacaggatttgagatgctaaggccccagagatcgtttgatccaaccctcttattttcagaggggaaaatggggcctagaagttacagagcatctagctggtgcgctggcacccctggcctcacacagactcccgagtagctgggactacaggcacacagtcactgaagcaggccctgtttgcaattcacgttgccacctccaacttaaacattcttcatatgtgatgtccttagtcactaaggttaaactttcccacccagaaaaggcaacttagataaaatcttagagtactttcatactcttctaagtcctcttccagcctcactttgagtcctccttggggttgataggaattttctcttgctttctcaataaagtctctattcatctcatgtttaatttgtacgcatagaattgctgagaaataaaatgttctgttcaacttataaaa

SEQ ID NO: 208 - DNA, 1013 bp, Homo sapiens
gttcccagaagctccccaggctctagtgcaggaggagaaggaggaggagcaggaggtggagattcccagttaaaaggctccagaatcgtgtaccaggcagagaactgaagtactggggcctcctccactgggtccgaatcagtaggtgaccccgcccctggattctggaagacctcaccatgggacgcccccgacctcgtgcggccaagacgtggatgttcctgctcttgctggggggagcctgggcaggacactccagggcacaggaggacaaggtgctggggggtcatgagtgccaaccccattcgcagccttggcaggcggccttgttccagggccagcaactactctgtggcggtgtccttgtaggtggcaactgggtccttacagctgcccactgtaaaaaaccgaaatacacagtacgcctgggagaccacagcctacagaataaagatggcccagagcaagaaatacctgtggttcagtccatcccacacccctgctacaacagcagcgatgtggaggaccacaaccatgatctgatgcttcttcaactgcgtgaccaggcatccctggggtccaaagtgaagcccatcagcctggcagatcattgcacccagcctggccagaagtgcaccgtctcaggctggggcactgtcaccagtccccgagagaattttcctgacactctcaactgtgcagaagtaaaaatctttccccagaagaagtgtgaggatgcttacccggggcagatcacagatggcatggtctgtgcaggcagcagcaaaggggctgacacgtgccagggcgattctggaggccccctggtgtgtgatggtgcactccagggcatcacatcctggggctcagacccctgtgggaggtccgacaaacctggcgtctataccaacatctgccgctacctggactggatcaagaagatcataggcagcaagggctgattctaggataagcactagatctcccttaataaactcacaactctctggttc

SEQ ID NO: 209 - DNA, 1144 bp, Homo sapiens
cgcctgtcttttccgtgctacctgcagaggggtccatacggcgttgttctggattcccgtcgtaacttaaagggaaattttcacaatgtccggagcccttgatgtcctgcaaatgaaggaggaggatgtccttaagttccttgcagcaggaacccacttaggtggcaccaatcttgacttccagatggaacagtacatctataaaaggaaaagtgatggcatctatatcataaatctcaagaggacctgggagaagcttctgctggcagctcgtgcaattgttgccattgaaaaccctgctgatgtcagtgttatatcctccaggaatactggccagagggctgtgctgaagtttgctgctgccactggagccactccaattgctggccgcttcactcctggaaccttcactaaccagatccaggcagccttccgggagccacggcttcttgtggttactgaccccagggctgaccaccagcctctcacggaggcatcttatgttaacctacctaccattgcgctgtgtaacacagattctcctctgcgctatgtggacattgccatcccatgcaacaacaagggagctcactcagtgggtttgatgtggtggatgctggctcgggaagttctgcgcatgcgtggcaccatttcccgtgaacacccatgggaggtcatgcctgatctgtacttctacagagatcctgaagagattgaaaaagaagagcaggctgctgctgagaaggcagtgaccaaggaggaatttcagggtgaatggactgctcccgctcctgagttcactgctactcagcctgaggttgcagactggtctgaaggtgtacaggtgccctctgtgcctattcagcaattccctactgaagactggagcgctcagcctgccacggaagactggtctgcagctcccactgctcaggccactgaatgggtaggagcaaccactgactggtcttaagctgttcttgcataggctcttaagcagcatggaaaaatggttgatggaaaataaacatcagtttctaaaagttgtcttcatttagtttgctttttactccagatcagaatacctgggattgcatatcaaagcataataataaatacatgtctcgacatgagttgtacttct

SEQ ID NO: 210 - DNA, 1701 bp, Homo sapiens
atggacttacaccgggcagccttcaagatggagaactcatcctaccttcccaaccctctggcatccccagcactgatggtcctggcatccacggctgaggccagccgtgatgcttccatcccttgtcagcagccacgaccctttggtgtacctgtctcagttgacaaggacgtgcatattcctttcaccaacggttcctatacctttgcctctatgtaccatcggcaaggtggggtgccaggcacttttgccaatcgtgatttccccccttctctactacacctccaccctcaatttgctcccccaaatctagattgcaccccaatcagtatgctgaatcatagtggtgtgggggctttccggccctttgcctccaccgaggaccgggagagctatcagtcagcctttacgccggccaagcgacttaagaactgccatgacacagagtctccccacttgcgcttctcagatgcagatggcaaggaatatgactttgggacacagctgccatctagctcccccggttcactaaaggttgatgacactgggaagaagatttttgctgtctctggcctcatttctgatcgggaagcctcatctagcccagaggatcggaatgacagatgtaagaagaaagcagcggcattgttcgacagccaggccccaatttgccccatctgccaggtcctgctgaggcccagtgagctgcaggagcatatggagcaggaactggagcagctagcccaactgccctcgagcaagaattcccttctgaaggatgccatggctccaggcaccccaaagtccctcctgttgtctgcttccatcaagagggaaggagagtctccaacggcatcaccccactcatctgccaccgatgacctccaccattcagacagataccagacctttctgcgagtacgagccaaccggcagacccgactgaatgctcggattgggaaaatgaaacggaggaagcaagatgaagggcagagggaaggctcctgcatggctgaggatgatgctgtggacatcgagcatgagaacaacaaccgctttgaggagtatgagtggtgtggacagaagcggatacgggccaccactctcctggaaggtggcttccgaggctctggcttcatcatgtgcagcggcaaagagaacccggacagtgatgctgacttggatgtggatggggatgacactctggagtatgggaagccacaatacacagaggctgatgtcatcccctgcacaggcgaggagcctggtgaagccaaggagagagaggcacttcggggcgcagtcctaaatggcggccctcccagcacgcgcatcacacctgagttctctaaatgggccagtgatgagatgccatccaccagcaatggtgaaagcagcaagcaggaggccatgcagaagacctgcaagaacagcgacatcgagaaaatcaccgaagattcagctgtgaccacgtttgaggctctgaaggctcgggtcagagaacttgaacggcagctatctcgtggggaccgttacaaatgcctcatctgcatggactcgtactcgatgcccctaacgtccatccagtgttggcacgtgcactgcgaggagtgctggctgcggaccctgggtgccaagaagctctgccctcagtgcaacacgatcacagcgcccggagacctgcggaggatctacttgtga

SEQ ID NO: 211 - DNA, 1865 bp, Homo sapiens
aaggaagaaacattagaaagaaaaaggaaggaaaacggtataaagagagatcaattacccacccttaaatagctagattggggggggaggggggtggaaaagaaagctgtggaggtgtgccccagcacggctgctttgaaaggtttatcatctatccgtttggtttatggagaaaaagaaaatggtaactcagggtaaccaggagccgacaacaactcctgacgcaatggttcagccttttactaccatcccatttccaccacctccgcagaatggaattcccacagagtatggggtgccacacactcaagactatgccggccagaccggtgagcataacctgacactctacggaagtacgcaagcccacggggagcagagcagcaactcacccagcacacaaaatggatctcttacgcagacagaaggtggagcacagacagacggccagcagtcacagacacaaagtagtgaaaattcagagagtaaatctaccccgaaacggctgcatgtctctaatattcctttccgcttccgggaccctgacctccggcagatgtttgggcagtttggcaaaatcctagatgtagaaataatctttaatgaacgtggctctaagggattcgggttcgtaactttcgagaatagtgctgatgcagacagggccagggagaaattacacggcaccgtggtagagggccgtaaaatcgaggtgaataatgctacagcacgtgtaatgaccaataagaagatggtcacaccatatgcaaatggttggaaattaagcccagtagttggagctgtatatggtccggagttatatgcagcatccagctttcaagcagatgtgtccctaggcaatgatgcagcagtgcccctatcaggaagagggggtatcaacacttacattcctttaatcattcctggcttcccttaccctactgcagccaccacggcagccgctttcagaggagcccatttgaggggcagagggcggacagtatatggtgcagtccgagcggtacctccaacagccatccccgcctatccaggggtggatatgcagcctacagatatgcacagcctgctactgcaaccgcagccaccgctgctgcagccgctgcagccgcttacagtgacggttatggcagggtgtacacagccgacccctaccatgcccttgcccctgccgctagctatggagttggcgctgtggcgagtttataccgaggtggctacagccgatttgccccctactgaagtgacgtgagacccctgcaaatgggacagccccccagttcatgaggcctggctattgcaatatttactagtagaggaactctatagcaagatgaagaggaaaaacaaacaaacaaacaaaaaaaaacacaaaaaaagaaagaatacttttttatacctcactatgttctttgaatatgtatttttcctttaaatttctgcctttaattcttttgttccaaagattgtgcatttttttctttttttttttaaactgtggtaaaaaaaaaaaaaataatgcatttccatgtctgtatgtccgtgcttagcttattctatcaatcacggaagaggcagtcaaggaggaaggagagacattaggagccgataaatgcatctgatcagaaatcagcagacagaattaccaaagtgtatctggtgctgaatgactgggggacaagcagaagtggaagagatctttctgcaacaggatattcttctagtcttctgagtttctggtctttgacaggcaattctggttggctgtggctggaatccacatgctgatagataggaatttgtgcttacaaagcaggagaattaaaaagacgctttcctctcctctt

SEQ ID NO: 212 - DNA, 2380 bp, Homo sapiens
tcggccaccgctcgcttcaatatggctgcccccagggagagacgaggctaccatgaaggagccgagcgcagaccctgagtccgtcacccatggatcgcagcgcggagttcaggaaatggaaggcgcaatgtttgagcaaagcggacctcagccggaagggcagtgttgacgaggatgtggtagagcttgtgcagtttctgaacatgcgagatcagtttttcaccaccagctcctgcgctggccgcatcctactccttgaccggggtataaatggttttgaggttcagaaacaaaactgttgctggctactggttacacacaaactttgtgtaaaagatgatgtgattgtagctctgaagaaagcaaatggtgatgccactttgaaatttgaaccatttgttcttcatgtgcagtgtcgacaattgcaggatgcacagattctgcattccatggcaatagattctggtttcaggaactctggcataacggtgggaaagagaggaaaaactatgttggctgtccggagtacacatggcttagaagttccattaagccataagggaaaactgatggtgacagaggaatatattgacttcctgttaaatgtggcaaatcaaaaaatggaggaaaacaagaaaagaattgagaggttttacaactgcctacagcatgctttggaaagggaaacgatgactaacttacatcccaagatcaaagagaaaaataactcatcatatattcataagaaaaaaagaaacccagaaaaaacacgtgcccagtgtattactaaagaaagtgatgaagaacttgaaaatgatgatgatgatgatctaggaatcaatgttaccatcttccctgaagattactaagctttggttctgatgtgtcttggccgtaatgtttctagtaggttttataaagctgctcttcataagagtattttagtttgttgagtgtatcagccattcataagccagtaatgacaagtgcagagcttcaaactataactttgttgcccagaggatgtgcagttgtcatctaagctctcagcagtacccggcttatcctacgacttcacctgaaatgctatagttatccctacttttttaccagtttctcccagaagcacctgcttaataaatcaaagatgtttgaatggtgtcttattctgaaataacctgacctaagacaggtatttagattattttggatacattttgaaaagggatagcataaatattttaagtaaaaagacctttattttaaataatagtggatattttaatgctggaaattagcattatagttgatatgccagaaattatatctttggttgtgatttaaacttatgctataaactaaattaatgatgtaaatacatagttttaaacattcttttagggacatgtaacttttaagtatcacttcaataatacgtattattataggaacaaagatttgggaataattgattacaggtgaggaagtactggaattccagttcaaggagataccatttcatttaggactaaaaggacaagatacaagttcacatgatgggaaaaatcagaaaacctctcgcagacaaagggtatataatggatatgaggcatcaaaaagcatggtatagtcagtgatggggaatagtccagaaaggctgaaacacagcatgtgatgcgagtcaaggtagttgatgcccaactgtgaagggccgttctaatctagcatggaggtagacagtgtttccttaatatggctgcatatcagaattacctaggtcaggacgaggcatggagatgctactttaataggccctgccgcagatcttccaaaccagaatcttaatcctggagtctaggaatctttatttttcacacaactcatccaagtggttctgataaaatcagtccagcacttttagaacccactgataacagacttattcctggagacagcatttgaggaggaattgaagatttttctaatgaaaagaaaaagggtcacatgaacagatgttgcagtgtacctgtgccagggatttcatgtgtacactttataggagaataagcaagagcttaggtaagttatagtccttaccattgggtctaaggcagtttccaggaaagcatggcaactcgttcagctatgtaagttgaactctgtaccacttgggagggaacattcccctagatgacaatgtcagtggcactcgaagttgtgcagtgcacattcttatctaccaacatatacagcagtccttctgggaaggaaatttgggcaggaaagggaactcacagtgtcggaatgcctggagcatttcttctagtctggtggacagaatatgaaagtatctgcctggcagtgcagtaaatgaaaagag

SEQ ID NO: 213 - DNA, 1530 bp, Homo sapiens
aggcggcgtgcggctgcatagcctgagaatcccggtggtgagcggggatggcggttgtagcggcggctgccggctggctactcaggctcagggcggcaggggctgaggggcactggcgtcggcttcctggcgcggggctggcgcggggctttttgcaccccgccgcgactgtcgaggatgcggcccagaggcggcaggtggctcattttactttccagccagatccggagccccgggagtacgggcaaactcagaaaatgaatcttttccagtctgtaacaagtgccttggataactcattggccaaagatcctactgcagtaatatttggtgaagatgttgcctttggtggagtctttagatgcactgttggcttgcgagacaaatatggaaaagatagagtttttaataccccattgtgtgaacaaggaattgttggatttggaatcggaattgcggtcactggagctactgccattgcggaaattcagtttgcagattatattttccctgcatttgatcagattgttaatgaagctgccaagtatcgctatcgctctggggatctttttaactgtggaagcctcactatccggtccccttggggctgtgttggtcatggggctctctatcattctcagagtcctgaagcattttttgcccattgcccaggaatcaaggtggttatacccagaagccctttccaggccaaaggacttcttttgtcatgcatagaggataaaaatccttgtatattttttgaacctaaaatactttacagggcagcagcggaagaagtccctatagaaccatacaacatcccactgtcccaggccgaagtcatacaggaagggagtgatgttactctagttgcctggggcactcaggttcatgtgatccgagaggtagcttccatggcaaaagaaaagcttggagtgtcttgtgaagtcattgatctgaggactataataccttgggatgtggacacaatttgtaagtctgtgatcaaaacagggcgactgctaatcagtcacgaggctcccttgacaggcggctttgcatcggaaatcagctctacagttcaggaggaatgtttcttgaacctagaggctcctatatcaagagtatgtggttatgacacaccatttcctcacatttttgaaccattctacatcccagacaaatggaagtgttatgatgcccttcgaaaaatgatcaactattgaccatatagaaaagctggaagattatgactagatatggaaatattttttctgaatttttttttatatttcctccgacttacctctttttgaaaagagagtttttattaagtgaaccatcacgatattggctgaaaagttctacattctattattgtattgtaacacacatgtattgatgattttcattaagagtttcagattaactttgaaaaatattccacatggtaatcttataaattctgtttaattacatctgtaaatattatgtgtgtgatagtattcaataaagtaaaatcaaattgtc

SEQ ID NO: 214 - DNA, 615 bp, Homo sapiens
gaaacaacaacagcatttggtttgctctacacccctgtcacccctcgcccgcaagcccagggagtggtcagcagtggggctttgtgatgtgaagccaccctagggctgccattggctgggacactgcctgtatgatcaaacaaagctcaagggtgtggctttgccttgtcaccaggagggtatatacagggagggcaagagctccgggccactgcgaagattcaaaacctacaaaagcctgccgcagacattgaagaaccaatatatacaatggacaaacaatccagtgccggcggggtgaagaggagcgtcccctgtgaatccaacgaggtgaatgagacgatgccggagaccccaactggggactcagacccgcaacctgctcctaaaaaaatgaaaacatctgagtcctcgaccatactagtggttcgctacaggaggaacgtgaaaagaacatctccagaggaactgctgaatgaccacgcccgagagaacagaatcaaccccctccaaatggaggaggaggaattcatggaaataatggttgaaatacctgcaaagtagcaagaagctacatctctcaaccttgggcaatgaaaataaagtttgagaagc

SEQ ID NO: 215 - DNA, 378 bp, Homo sapiens
gaggatgtccttaagttccttgcagcaggaacccacttaggtagcaccaatcttgacttccagatggaacagtacatctataaaaggaaaagtgatggcatctatatcataaatctgaagaggacctgggagaagcttctggcagcttgtgctgttgttgccattgaaaaccctgctcatgtcagtgttaaatcctccaggaatactggccagagggctgtgctgaagtttgctgctgccactggagccactccaattgctggccgcttcactcctggaaccttcactaacgagatccaggcagccttctgggagccacggcttcttgtggttactgatcccagggctgaccaccagcctctcacagaggcatcttaa

SEQ ID NO: 216 - DNA, 3657 bp, Homo sapiens
tcacctgccgtccaggtatcatcctagtcttccctccgtctctgggatgggaaactcttgtctagtgatgtgactcattacgtgatcccagactggaaagttgttcaagattatcttgagatccttgagtttcctgagttgaagggaattattttcatgcagacagcttgtcaagctgtgcagcatcaaagaggcaggagacagtataacaaactgcgaaacctgctgaaggatgcgcgtcatgattgcattctctttgctaatgaattccagcaatgctgctatctgccacgggaaagaggagagtccatggagaagtggcagaccaggagcatatacaacgcagctgtttggtactatcatcactgccaggacaggatgccaattgttatggtgacagaagatgaagaggcaattcagcagtatggaagtgaaacagaaggagtattcgtgattactttcaagaattacctggacaatttctggcctgatttaaaagctgcccacgagctttgtgattctatccttcagtctcgacgggagagagagaatgagagtcaggagagccatgggaaggagtacccagaacatcttcccctggaagtgttagaagctgggattaaatctggacgctatatccagggaattctgaatgtcaacaaacacagagcccaaatagaagcttttgttcgacttcaaggagccagcagtaaagattcagatttagtcagtgacatcctaatccacgggatgaaggctcgaaaccgctcaattcatggagatgtggtagttgtggagctgcttcctaaaaatgaatggaaaggaagaaccgtagccctgtgtgagaatgactgtgacgacaaggcttcgggcgagtccccaagtgagcccatgcctacaggtcgagtggtgggcatacttcagaagaactggcgggattatgtggtgacatttccgtccaaagaagaggtccaatctcagggcaaaaatgctcagaaaatcctggttacaccttgggattacagaattcccaaaattcgaattagcactcagcaagcagaaaccctccaggacttcagggtggtcgtgcgcatcgattcctgggagtcaacatctgtgtatccaaatggacattttgtgcgtgttttaggaagaatcggagatctggaaggggaaattgcaaccatcctggtggaaaacagtatttcagttattcctttctcagaagctcagatgtgtgagatgccagtaaacacaccagaaagtccctggaaggtgagtcctgaagaggaacaaaaacgtaaagacttgaggaaaagccatctcgtattcagcattgaccccaaaggttgtgaagatgtggatgacacactctcagtcagaaccttaaataatggcaacctggaacttggggtccacatcgcagatgtaacacactttgtggcaccaaattcttacattgatattgaagctagaacaagggccaccacttattatctagcagatcgtcgctatgacatgctgccttccgtcctcagtgcagatttgtgttcccttctgggaggcgttgataggtatgctgtaagcatcatgtgggaactggataaagcctcttatgaaattaagaaagtgtggtatggcagaaccattattcgatcagcatacaaactgttctatgaagcagcccaagaactactggatggaaacttaagcgttgttgatgatattccagaattcaaagacttggatgagaagagcagacaagccaagctggaggagttggtgtgggcaattggaaagctgaccgacatagctcgccatgtcagagctaaacgagacggatgtggtgccctggaactggaaggggtagaggtttgcgtacagctagatgacaaaaagaacattcacgacctcatccccaagcagcccctggaagtccacgagacagtggctgaatgcatgatcctggccaaccactgggtcgccaaaaagatctgggagagcttccctcatcaggccttgctgcgccagcaccctcctccacaccaggagttcttttcagaactccgggaatgtgctaaagccaaaggcttcttcatagatacacggtccaataaaacactggctgattctctggataatgcgaacgacccccacgatcccattgtgaacaggctactgcgctccatggccacgcaggccatgtcgaatgctctgtacttctccaccggatcctgtgcggaggaggagttccatcattacggtcttgcattagataaatatacccactttacttctccaataagaagatattcagatattgtagtacaccgcttgttaatggcagccatttcaaaagataagaaaatggaaattaagggaaatctgttcagcaacaaagatcttgaggaattatgcagacatatcaacaacagaaaccaagcagcacagcattctcagaagcagtctactgagctcttccagtgcatgtacttcaaagacaaagaccctgccaccgaggagcgttgcatatctgacggagttatttattcaattagaacaaatggtgtgcttctatttataccaaggtttgggattaaaggtgctgcttatctaaaaaataaagatggtttagtcatctcatgtggcccagatagctgttctgaatggaaaccaggatcccttcaacgatttcaaaacaaaattacctctactacaacagatggggaatctgttacgttccatttgtttgaccatgtaaccgtaagaatatccatacaggcctcacgttgccattctgatacaatcagacttgaaataattagtaacaaaccatacaagataccaaatacagaacttattcatcagagttcccccttgctgaagagtgagttagtgaaagaagtaactaaatctgtggaagaagctcagcttgcccaagaagtcaaagtaaacatcattcaggaggaatatcaagaatatcgccaaacaaagggaaggagcctatacacacttctagaggagatacgggacctagctctcctggatgtttcaaacaattatggaatatgagaggctcttacttcactaagagctgtcatatgtgaatgttttacagtcttttcaaacttaacatttaatgtgtgtcactcagtgctctagtcgatcaggactgggtagctatttcgcatatatgtaaaatgttctcagccgggcacggtggctcacgcctgtaaccccagcactttgggaggctgaggcgggcggatcacgaggtcaggagattgagaccatcctggctaacacggtgaaacccagtctctactaaaaatacaaaaattagcccggcgtggtggcatgcgcctgtagtcccagctacttgggaggctgaagcaggagaattgcctgaacccaggaagaggaggttgcagtgagccgagatcgcaccactgcattccagcctgggcaacagagcgagactccatctcaaaaaaaaaaaaaaaaaaaaaaaaagttctctcattcattaaagttgcattaaataaagtataattaggtcactatggaaacagagttttcagtaatgagtggacagtaagtggtggctctgcagatggcccctttctaataagtttaataaacccgaaattactggtt

SEQ ID NO: 217 - DNA, 3309 bp, Homo sapiens
gatgcgccctcccgcctggcgtcctccgcagattcgcgctgagaggcccgcggagacccgccccagaggctcaagaaaacccgcgggagcctcgcccggacccaggaactcgtgctcggggccaaccggctgggccgcgatcgcgtttcgtccggggccgcggcggccgtggggaatcggctgcagcgaatcggtggcgcgcggcgcctgagcgcgctgcagtcacccgggagccgggtccaggtcgtcttcccgtgacgcccagatctgtcctgcaggatggagccagcaccctcagaggttcgactcgccgtccgggaagccattcatgccctctcgtcttcggaggatggcggccacatcttctgcaccctggagtccctgaagcggtatctcggtgagatggagcctccagcgctcccgagggagaaggaggagtttgcctcggcccacttctcgcctgtcctcagatgtcttgccagcaggctgagcccagcctggctggagctgctgccccatggccgcctggaggagctgtgggccagcttcttcctggagggcccggcggaccaagccttcctggtgttgatggagaccatcgagggtgctgcgggccccagcttccggctgatgaagatggcgcggctgctggccagattcctgcgcgagggccggctggcagtgctgatggaggcgcagtgtcggcagcagacgcagcccggcttcatcctgctccgggagacgctgctgggcaaggtggtggccctgcccgatcacctgggcaaccgcctgcagcaggagaacttggccgagttcttcccccagaactacttccgcctgctcggcgaggaggtcgtccgggtgctgcaggcggttgtggactctctccaaggtggcctggattcctccgtgtccttcgtgtctcaggtccttgggaaagcctgtgtccacgggaggcagcaggagatcctgggcgtgctggtaccccggctggcagcgctcacccagggcagctacctgcaccagcgcgtctgctggcgcctggtggagcaagtgccggaccgggccatggaggctgtgctgaccgggctggtggaggccgcactggggcctgaggtcctttcgagactgctggggaacctggtggtgaagaacaagaaggcccagtttgtgatgacccagaagcttctgttcttacagtcccggctcacgacgcccatgctgcagagcctgctgggccatctggccatggacagccagcggcgcccgctcctgctgcaggtgctgaaggagctgttggagacgtggggcagcagcagtgccatccgccacactcccctgccgcagcagcgccacgtcagcaaggctgtcctcatctgcctggcgcaactcggggagccggaactgcgggacagccgggatgaactgctggccagcatgatggcgggcgtgaagtgccgcctggacagtagcctgccccccgtgcgacgcctgggcatgatcgtggcagaggtcgttagtgcccggatccaccccgaggggcctcccctgaaattccagtacgaagaggatgaactgagcctcgagctgctggccttggcctccccccagcctgcgggtgacggcgcctcggaggcgggcacgtccctcgttccagccacggcagagccccctgcagagacccccgcagagatcgtggatggcggcgtcccccaagcacagctggcgggctctgactcggacctggacagcgatgatgagtttgtcccctacgacatgtcgggggacagagagctgaagagcagcaaggctcctgcctacgtccgggactgcgtggaagccctgaccacgtctgaggacatagagcgctgggaggcagccctgcgggcccttgagggcctggtctacaggagccccacagccactcgggaggtgagcgtggagctggccaaggtgcttctgcatctggaggagaagacctgtgtggtgggatttgcagggctgcgccagagagccctggtggccgtcacggtcacagacccggccccggtggccgactatctgacctcacagttctatgccctcaactacagcctccggcagcgcatggacatcctggatgtgctgactctggctgcccaggagctgtctaggcctgggtgcctcgggaggactccccaacctggctccccaagtcccaacaccccgtgcctgccagaggcagccgtctctcagcctggcagtgccgtggcgtctgactggcgggtggtggtggaggagcggatcagaagcaagacccagcggctctccaagggtggcccgaggcagggcccggcaggcagccccagcagattcaactccgtggccggccacttcttcttccccctccttcagcgctttgacaggcctctggtgaccttcgacctcttgggagaagaccagctggttctcggaaggctggcgcacaccttaggggccctgatgtgcctggctgttaacaccacggtggctgtggccatgggcaaggccctgctggaattcgtgtgggcccttcgcttccacatcgatgcctacgtgcgccaggggctgttgtcggccgtctcctccgtcctgctcagcctgcctgctgcgcgcctgctggaggacctgatggacgagctgctggaagcccggtcctggctggcggacgtggctgagaaagacccggacgaggactgcaggacgctggcactgagggccctgctgcttctgcagagactcaagaacaggctcctcccacccgcgtctccctagtccctggaggcctccccaggaccaccctcgccgacagcaaggcaggcggctgagcagcggcctggagcagcagagccaggctttgtagcgaggccaggtcttcggccgcatccggtacggagagtgcagatgcaggaaggcccggcctgccgctatttatagtgcagccagtccgctaaaaatacactgggcctgggcactgcccgccgggacatggcagcctggacgtggggctggggctgtgggcgctgctggcggggttgactcttccagtgagggcagaaccaggctggcaggaggggaggacggtgtacctgctgctcagagcccccaaggctctcctctgagagccaccaagcaggacagagcagctcttgtcccaggtccctcgggctgagcgccgtgtcaccaggagaatagtgctcacagcccaggcagggtgtgtggctcctggatgggctcgtggggcgggatgggacagggcacgggctctcagaaaataaactgctttattgg

SEQ ID NO: 218 - DNA, 1441 bp, Homo sapiens
gccctcccagtttccgcgcgcctctttggcagctggtcacatggtgagggtgggggtgagggggcctctctagcttgcggcctgtgtctatggtcgggccctctgcgtccagctgctccggaccgagctcgggtgtatggggccgtaggaaccggctccggggccccgataacgggccgcccccacagcaccccgggctggcgtgagggtctcccttgatctgagaatggctacctctcgatatgagccagtggctgaaattggtgtcggtgcctatgggacagtgtacaaggcccgtgatccccacagtggccactttgtggccctcaagagtgtgagagtccccaatggaggaggaggtggaggaggccttcccatcagcacagttcgtgaggtggctttactgaggcgactggaggcttttgagcatcccaatgttgtccggctgatggacgtctgtgccacatcccgaactgaccgggagatcaaggtaaccctggtgtttgagcatgtagaccaggacctaaggacatatctggacaaggcacccccaccaggcttgccagccgaaacgatcaaggatctgatgcgccagtttctaagaggcctagatttccttcatgccaattgcatcgttcaccgagatctgaagccagagaacattctggtgacaagtggtggaacagtcaagctggctgactttggcctggccagaatctacagctaccagatggcacttacacccgtggttgttacactctggtaccgagctcccgaagttcttctgcagtccacatatgcaacacctgtggacatgtggagtgttggctgtatctttgcagagatgtttcgtcgaaagcctctcttctgtggaaactctgaagccgaccagttgggcaaaatctttgacctgattgggctgcctccagaggatgactggcctcgagatgtatccctgccccgtggagcctttccccccagagggccccgcccagtgcagtcggtggtacctgagatggaggagtcgggagcacagctgctgctggaaatgctgacttttaacccacacaagcgaatctctgcctttcgagctctgcagcactcttatctacataaggatgaaggtaatccggagtgagcaatggagtggctgccatggaaggaagaaaagctgccatttcccttctggacactgagagggcaatctttgcctttatctctgaggctatggagggtcctcctccatctttctacagagattactttgctgccttaatgacattcccctcccacctctccttttgaggcttctccttctccttcccatttctctacactaaggggtatgttccctcttgtccctttccctacctttatatttggggtccttttttatacaggaaaaacaaaacaaagaaataatggtctttttttttttttt

SEQ ID NO: 219 - DNA, 1182 bp, Homo sapiens
gcggccgcaccccccggccgggccgtgcttctgcccctacaaggtttgggccgaggtgggggagggtcctggttgccggccccgcccggtccctccccgccttttaggcgcccgcgtggccgggacgtcccagtcccgctccgtcctcctcgcctgccaccggtgcacccagtccgctcacccagcccagtccgtccggtcctcaccgcctgccggccggcccaccccccaccgcagccatggacgccatcaagaagaagatgcagatgctgaagctggacaaggagaacgccatcgaccgcgccgagcaggccgaagccgacaagaagcaagctgaggaccgctgcaagcagctggaggaggagcagcaggccctccagaagaagctgaaggggacagaggatgaggtggaaaagtattctgaatccgtgaaggaggcccaggagaaactggagcaggccgagaagaaggccactgatgctgaggcagatgtggcctccctgaaccgccgcattcagctggttgaggaggagctggaccgggcccaggagcgcctggctacagccctgcagaagctggaggaggccgagaaggcggctgatgagagcgagagaggaatgaaggtcatcgaaaaccgggccatgaaggatgaggagaagatggaactgcaggagatgcagctgaaggaggccaagcacatcgctgaggattcagaccgcaaatatgaagaggtggccaggaagctggtgatcctggaaggagagctggagcgctcggaggagagggctgaggtggccgagagccgagccagacagctggaggaggaacttcgaaccatggaccaggccctcaagtccctgatggcctcagaggaggagtattccaccaaagaagataaatatgaagaggagatcaaactgttggaggagaagctgaaggaggctgagacccgagcagagtttgccgagaggtctgtggcaaagttggagaaaaccatcgatgacctagaagagaccttggccagtgccaaggaggagaacgtcgagattcaccagaccttggaccagaccctgctggaactcaacaacctgtgagggccagccccacccccagccaggctatggttgccaccccaacccaataaaactgatgttactagcctctcaaggccctttaatcctt

SEQ ID NO: 220 - DNA, 495 bp, Homo sapiens
atgtccaaagcccttgatgtcctacaaatgaaagaggaggatgttcttaagttttttgctgcaggaacccatttaggtggcaacaaccttgacttcaaaatggaacagtacatcaatgagaggaaaagtcatggcatctacatcataaatatgaggaggacctgggagaagcttctgctagcagcttgtgtctttgctgccactgaaaactctgctgatgtcagtgtcatatcctccaagagtactagccaatgggccttgttaaagtttgctgctaccattgaagctactcctattacttgctgcttcactgaaaacatcactaaccagatccagatggtcttttggaagccatgggttctgattgttactgagcccagggttgacctccatcctctcatagaggcatcttatggtaacctgcctaccattggtttgtgtcacagattctcctctgcactatgtggatattgccatcccatgcaacaacaaggg

SEQ ID NO: 221 - DNA, 1523 bp, Homo sapiens
gccgtttctgccgcgtccaccacaacctctgctgtatcagagggggccttcgccgccgccgcccccaccaccgcccctgccgccatcgccacctccgccgctgccgccttggggccctcctccttcaccgcccccttcaccacctctacacgttctaggccttctgtcctggagaagaagctatagtcgttctcccttgtgggcccggggcgcagccatggcggacggcggcggcggcgggggaactggcgcggtgggcggcggcggaactagccaggcctctgccggggcagcgactggcgctactggggccagcgggggcggtggccccatcaacccggcctcgctgcctcccggcgacccgcagctcatcgctctcatcgtggagcagctcaagagccggggcctttttgacagcttccgccgggactgcctggccgacgtggacaccaagccagcttaccaaaacctgaggcagaaagtggataattttgtgtcaacacatctggacaagcaggaatggaatcctacgatgaacaaaaaccagttgcgaaatggtctgaggcagagtgtggttcagtcagggatgttggaagctggagtagacaggattatttctcaggtggtggatccaaaacttaaccacatcttcaggccacaaatagaacgagcaattcatgagttcctggcggcccagaaaaaagcagctgtgccagcaccccctccagagcccgaaggccaggaccctccagctccatctcaggacacttcctaagaatacgccagacaccttttgaaagctaatttttggtgaagaaatggattcggttacataagagtgcaacttcagactgaagataggccaaggtcgtcactgatctcaagatttcaaccttgaccatgggcagtgaccagattgaaaggggagcaagttcggcagtgggagagttgaccgtgtcaccccctgcattgtgctgccatttggccagcctgtccaagggcatgacaccaagtagacactacagagagagaaacactacagcaacccagggttgtcctgaaacagacttttatacttgaacatggagactgcacatggactttagggtttgtgctgtgggataaacggaagctacagtgagaacatagccagtcccaaagacaatttcaaagaaaaatgacagtaaagattagctgggagtagtctttgacagtgcttatttgatactgtctctcagagtttgcaaaccagattgtacaagtcattagcgtcagatagctttaaagttgtgaccttcttgtacatgaatcttctagccagtttcctttcctttgtaacgaaacatgaaatcctagaatgtatgagaagttcagacattaggcataaggaaactcgtttgcaggctctctgtccagggctgcttcctgtcctggaggggccagtgagtcttaggtatgtttattttattctcacatttgtgtttttttagaaaagtgaatggtcaataaatggcttatctttc

SEQ ID NO: 222 - DNA, 2209 bp, Homo sapiens
agcagacaagatggcttccgggatttggcggcgcctttgtctctcgctgcagccggagctccaggtctcgctttcattgctctgtgtcctctgctcctagaggtccagcctctgtgggcctgtgacctgcagaaattgagagatccacagctaagactccaggaccccctggaagcctagaaatgggactgttgacatttagggatgtggccatagaattctctctggaagaatggcaatgcctggacactgcacagcggaatttatataaaaatgtgattttagagaactacagaaacctggtcttcctgggtattgctgtctctaagcaagacctgatcacctgtctggagcaagaaaaagagcctttgactgtgaagagacatgagatggtgaatgaacccccagtaatgtgttctcattttgcccaagagttttggccagagcagaacataaaagattcttttgaaaaagtgacactgagaagatatgaaaaatgtggaaatgataattttcagttaaaaggctgtaaaagtgtggatgaatgtaagttgcacaagggaggttataatggacttaaccaatgtttaccaactatgcagagcaaaatgtttcaatgtgataaatatgtgaaagtctttaataaattttcacattcagatagacataagataaaacatatggaaaataaacctttcaaatgtaaagaatgtggcagatcattttgcatgctttcacacctaactcgacatgaaagaaattataccaaggtgaatttctgcaaatgtgaagaatgtgaaaaagctgttaaccaatcttcaaagcttactaaacataaaagaatttatacttgtgagaaactctacaaatgtcaagaatgtgacagaacttttaaccaattctcaaaccttactgaatataaaaaagattatgctcgagagaaaccatacaaatgtgaagaatgtggcaaagcctttaaccagtcctcacaccttactacacataagataattcatacaggagagaaaccctacaaatgtgaagaatgtggcaaagcctttaaccagttctcaaatcttactacacataaaaaaattcatactggagagcaaccctacatatgtgaagaatgtggcaaggcttttacccaatcctcaacccttactacacataagagaattcatactggagaaaaaccctacaaatgtgaagaatgtggaaaagcttttaaccgatcctcaaaacttactgaacataaaaacattcatactggagagcaaccctacaaatgtgaggaatgcggcaaagcttttaaccgatcctcaaatcttacggaacataggaaaattcataccgaagagaaaccctacaaatgtaaagaatgtggcaaagcttttaaacactcctcagcccttactacacataagagaattcacactggagagaaaccctacaaatgtgaagaatgtggcaaagcttttaaccgatcctcaaaacttactgaacataagaaacttcatactggaaagaaaccctacaaatgtgaagaatgtggcaaagcttttatccaatcctcaaaacttactgaacataagaaaattcattctggagagataccctacaagtgtgaagaatgtggcaaagcttttaaacactcctcatcccttactacacataaaagaattcatactggggagaaaccctacaaatgtgaagaatgtggcaaagcttttagccgatcctcaaaacttactgaacataagataattcatactggagagaaaccctataaatgtgagagatgtgacaaagcttttaaccaatctgcaaaccttactaaacataaaaaaatacatactggagagaaactacagaactggaatgtgtgataatgattttgacaacacctcaaatttttctaaatataaaggaaatcatactggtgaaaaattctagaaatgtaaagaatgtgtcaaagactttaaatggttttcacacttcattgtatgtaagataattcatactggagaaaactacaagtgtgaagaatttggcaatactgttaattaaggctcaaaccttattgcacaggaaagcgtttatacttaagaaaaattgtacaaatataaagagtgtaaaatagccattaatatctgttgacatcttaatatcagaatgttggtacttaataaaagcattataaatgcaa

SEQ ID NO: 223 - DNA, 1632 bp, Homo sapiens
agggccggggtggggccgctggcgtttccgttgcttggatcagtctaggtgcagctgccggatccttcagcgtctgcatctcggcgtcgccccgcgtaccgtcgcccggctctccgccgctctcccggggtttcggggcacttgggtcccacagtctggtcctgcttcaccttcccctgacctgagtagtcgccatggcacaggttctcagaggcactgtgactgacttccctggatttgatgagcgggctgatgcagaaactcttcggaaggctatgaaaggcttgggcacagatgaggagagcatcctgactctgttgacatcccgaagtaatgctcagcgccaggaaatctctgcagcttttaagactctgtttggcagggatcttctggatgacctgaaatcagaactaactggaaaatttgaaaaattaattgtggctctgatgaaaccctctcggctttatgatgcttatgaactgaaacatgccttgaagggagctggaacaaatgaaaaagtactgacagaaattattgcttcaaggacacctgaagaactgagagccatcaaacaagtttatgaagaagaatatggctcaagcctggaagatgacgtggtgggggacacttcagggtactaccagcggatgttggtggttctccttcaggctaacagagaccctgatgctggaattgatgaagctcaagttgaacaagatgctcaggctttatttcaggctggagaacttaaatgggggacagatgaagaaaagtttatcaccatctttggaacacgaagtgtgtctcatttgagaaaggtgtttgacaagtacatgactatatcaggatttcaaattgaggaaaccattgaccgcgagacttctggcaatttagagcaactactccttgctgttgtgaaatctattcgaagtatacctgcctaccttgcagagaccctctattatgctatgaagggagctgggacagatgatcataccctcatcagagtcatggtttccaggagtgagattgatctgtttaacatcaggaaggagtttaggaagaattttgccacctctctttattccatgattaagggagatacatctggggactataagaaagctcttctgctgctctgtggagaagatgactaacgtgtcacggggaagagctccctgctgtgtgcctgcaccaccccactgccttccttcagcacctttagctgcatttgtatgccagtgcttaacacattgccttattcatactagcatgctcatgaccaacacatacacgtcatagaagaaaatagtggtgcttctttctgatctctagtggagatctctttgactgctgtagtactaaagtgtacttaatgttactaagtttaatgcctggccattttccatttatatatattttttaagaggctagagtgcttttagccttttttaaaaactccatttatattacatttgtaaccatgatactttaatcagaagcttagccttgaaattgtgaactcttggaaatgttattagtgaagttcgcaactaaactaaacctgtaaaattatgatgattgtattcaaaagattaatgaaaaataaacatttctgtccccctgaattat

SEQ ID NO: 224 - DNA, 7915 bp, Homo sapiens
ccttagccccgtgggccccacggagtgagcggcatgcagcacccccgggcctgtccagtgtcctctggcctgctgccctgcacccccagaaggccctgacgccctggggcacttctgctctgcacaggaccacgcgggggtttgccatggtgacataaaggggcgcggaggaaggaaggagcgtgaccagcctgtggactgcgcccctggctgggaggaaggactgggggcccagatcctccactcccagtgccccacaagggcgtcgcttcctaagtctctgtgaatttgttggtcagtggacgattctcgtgtctcctcctgtgtggggccttggggtagccagggcaggccgggcctccggtggccaaggtctcggaggccaggatgcctgccctggcatgcctccggaggctgtgtcggcacgtgtccccgcaggctgtccttttcctgctgttcatcttctgcctgttcagcgttttcatctcggcctactacctatatggctggaagcgaggcctggagccctcggcggatgcccccgagcctgactgcggggacccgccgcctgtggcccccagtcgcctgctgccactcaagcctgtgcaggcagccaccccttcccgcacagacccgttggtgctggtctttgtggagagcctctactcgcaactgggccaggaggtggtggccatcctggagtccagccgcttcaaataccgcacagagattgcgccgggcaagggtgacatgcccacgctcactgacaagggccgtggccgcttcgccctcatcatctatgagaacatcctcaagtatgtcaacctggacgcctggaaccgggagctgctggacaagtactgtgtggcctacggcgtgggcatcattggcttcttcaaggccaatgagaacagcctgctgagtgcgcagctcaagggcttccccctgttcctgcactcaaacctgggcctgaaggactgcagcatcaaccccaagtccccgctgctctacgtgacgcgacctagcgaggtggagaaaggtgtgctccccggcgaggactggacggttttccagtcaaatcactccacctatgagccagtgctgctggccaagacgcgctcgtctgagtccatcccacacctgggcgcagacgccggcctgcatgctgcactgcacgccactgtggtccaggacctgggcctgcacgacggcatccagcgcgtgctgtttggcaacaacctgaacttctggctgcacaagcttgtcttcgtggatgccgtggccttcctcacggggaagcgcctctccctgccattggaccgctacatcctggtggacattgatgacatcttcgtgggcaaggagggcacacgcatgaaggtggaggacgtgaaggccctgtttgacacacagaacgaactacgcgcacacatcccaaacttcaccttcaacctgggctactcagggaaattcttccacacaggtaccaatgctgaggacgctggggatgatctgctgctgtcgtatgtgaaggagttctggtggttcccccacatgtggagccacatgcagccccaccttttccacaaccagtccgtgttggccgagcagatggccttgaacaagaagttcgctgtcgagcatggcattcccacagacatggggtatgcagtggcgccccaccactcgggcgtgtaccccgtgcacgtgcagctgtacgaggcttggaagcaggtgtggagcatccgcgtgaccagcacggaggagtacccccacctgaagccagcccgctaccgccgtggcttcatccacaatggcatcatggttctcccacggcagacctgcggcctcttcacacacaccatcttctacaacgagtaccctggcggctccagtgagctggacaagatcatcaacgggggcgagctcttcctcaccgtgctcctcaatcctatcagcatcttcatgacgcacctgtccaactatgggaatgaccgcctgggcctgtacaccttcaagcacctggtgcgcttcctgcactcctggacgaacctccggctgcagacactgccccctgtgcagttggcgcagaagtacttccagatcttctccgaggagaaggacccgctctggcaggacccctgcgaggacaaacgtcacaaagacatctggtccaaggagaagacgtgtgaccgcttcccaaagctcctcatcatcggcccccagaaaacaggcaccactgccctctacctgttcctgggcatgcaccctgacctaagcagcaactaccccagctctgagacctttgaggagatccagttttttaatggccacaactatcacaaaggcatcgactggtacatggagttcttccccatcccttccaacaccacctccgacttctactttgagaaaagcgccaactactttgattcagaagtggcgccccggcgggcagcagccctcttgcccaaagccaaggtcctgaccatcctcatcaaccccgcggaccgggcctattcctggtaccagcaccagcgagcccatgacgacccagtggccctaaagtacaccttccatgaggtgattaccgccggctctgacgcatcctcgaagctgcgtgccctccagaaccgctgcctggtccctggctggtacgccacccacatcgagcgctggctcagtgcctatcacgccaaccagattctggtcttggatggcaaactgcttcgcacagaacctgccaaagtgatggacatggtgcagaagttccttggggtgaccaacaccattgactaccacaaaaccttggcgtttgatccaaagaaaggattttggtgccaactgcttgaaggaggaaaaaccaagtgtctgggcaaaagcaagggccggaaatatcccgagatggacttggattcccgagccttcctgaaggactattaccgggaccacaacatcgagctctccaagctgctgtataagatgggccagacacttcccacttggctacgagaggacctccagaacaccaggtagccgtggccaccacagccagactgaacgtttgtgaaagctgggacatcccaccacacgctgagccagacctgcagagtgggaagctggaccagggcagctgcgcacttatgagcaatactctgtggaggtctggtggggctgggggagcacccaggcggatctgcaagcacctcggagcacccaccgctgggtctgcggcctaagggacctccctcgccagcagaggtccattccgttcccagctgctcctggggaggccgcttcctggtaggagggagtccacgagactcttttctgtccctcactgtgttccgccgactgtcccctctcgtcacccatcactccctgcttccgcagggcgcccctcagtattcgctgccatatgtccctgtcctccaggctgtaggggaggagagcctggccgggggagacagactggacatttccctgtttcgagccaggctcttccaaggggccagctgggtccccggagtcagtcctaggctggatgggagggtggccccctcaagaggactcccagcctccacatctggttcctaccttcacatctcaccctcccgttctggggaagaatttctggttcctacagtatccactccatcctcaaggcttcccgcagggccttggggcactgccttgccatcgggcccagttctccgggccccacctgcacccctttcttccccctgggatatgatgtgtggtgtttcctgtggtaaaagactgaggcaggccaggggtctgccagtaacatgttcccatgtacagacacggtccccacaccctcccagcctcaggcccaggcagacatgggcgagctggtgagactgccagccacggctttgcttagccacctgtggccgagggctctcagagacccccttaacctcccaaatactaagaagctaaaatattttaatattttgtttttttttttcttggtgccagagtttataccctgggtgctggggtcgcactgtgttatatatatatatatatatatataatgtgtatatatatatattctattttttttggttgggttcgtttttaattcagtcctacaaaatggtggtaagccccagtctcaggggtcaccctgtcttagagctagagatgaggtggcagggagggaggctgtgtcctcagtggcctggggctgagcagaccttaggaaggggccctccccagtgccgtggctgctctggggctaccccaggtgaacagaggtggtgagatgcgcagggaagaccagctctctccaggacatcgggctgcgtgaagtccagtgaccctgaggggattttggccaaaggaaacagccagggctgggctaggagagctggggtcaaaagctgccccacccactctccctcacatggtgctaggctgggagctgccctgagagctgggatgcccaccaaggcccacagaactgtctccaggcccttgtagacagtgggatctctgggctgatttctggttggggtctgctcctaccccaccccatttaacaatgtgaagtgactgaggctggggtgcctctccctggccccctccaactgccaaattctgcttccctctgaaccccaggaaatactttctggagaggcttgtcttgttcagaagactctagcatcttggggctggaaggtcctttgacgggtatgaaacaggtccagaaaggggaggtggcctgcttggccgacgtcatggagccagctgggagcagggctgagcgttgaacccgaggctcccggttccaagtcccatcgtgctcctcttccaatgccacactgcctctgagcccatccttgggaccctactctgtgccaggttcctgtcccttcctccgtcacagcatggtcattccaggatatggggacaaaccactccttcccagccagggtgcctttgagccttctcattccgaggtctgcgtttgcatccctgtcgtgttctccctcgaggggtccttccccagcctgtgggggcctgggtctgttctgagctgattcccttttctccagttctctgctgggatgaagaaagttggacactcagtgggaccagctgcaggtggtttcactgtgtacacagcagtgtccccatcatgcctctcaatggggcctgcaagcctgggaacttgggcatcgttgggccagcaggatgagcagcaaagggtctgaggacagggtggcatgtctgcttgtgtgctcatgaagacatgcccacgccatggagccaggggcttatagagaggggcagtgacttccagagtcccatccgtcagtgaggggactgggctgcgggatgggtgaggatcttacagctcccaggttcggaaatctaccctctaggcctggaggcctctctcgcagagcatggaaggcaggagaggtgggctggcctagggcaggagctccacttctctctgcctctggctatgggaaggagcaggcggttggaaatcctgtgacagcagagatcttctggatttttgcctggacccttctgcaagcctggagactggacctgccacatgttccaagtctgtctgcctaggtcactgctgccacttctcctcccactaacagacctttcttgaagacccactaggtccagacactgccgggacttgcaggtatggggggtagaaggagaggcagataagctgcctggggggctgttagctaatgggtacaaggacaccccctcccgagaagagaagccacagatgagtgggccagcgaggccagtcttcaatgtccactaattcactctaagcatttggccaaaaaaaggagagagaaataactgaaattgttcaggtggctccatcgtctattctgtggtcccctccatgagcctttgccccagggtgggtgcaggtgcgagtgtcacctgcagctgcctcagtcattcagagttccagagccttctgtggtggagcatcctgctgcttggaggatgagtctgaagtttaaaaatgggccttttctgagcccccctgatgagcagtcagtgcttctgggcccagctaaggaagccatctgttcccagcagaggagagctgctgcgctgacctgcagaggttggtggtcccagcacagagctgtgcccatgggcttgttagtgggaaaagcaaatacaacaatgttttaccaaacatttaattatgaatgcccactccccagcatctagatctaaaattattaacattttgccacattctttttctctctctgtgtatgtatatgttttctctgtcctaatttaaaagtacattgcaaacatcatgaaacttgatccctgaaagcttcagcctgcatctcctaagagttagggcattgtcctacacattggcccagtatcacagccaagacgagaagtcatttcccagcgatgtctgctatctaatctgtattcaaatccccccaattgtctcccaggtaacttatgtgtctggttttggaatcagcatccagtcacggtgcacacattgcattttctaactatgtttttaaaacctctttgaatgctgaaaggtcttccctcagctcactttgagtttttaaatgacattgtttttgaggccctaggcctgctgtctttttgaagccccacattctgaatttgtcagattgtttgctcatggtgtcgcataaccacttcttctatcccctgtactttcaaggataatttaggctacatgagattttgccttttgtgctgacttgacagcttcacttctgcctaagatgcgcctccactgtcacctgtaccaagtgccaaaacagcagaggggccagttagagcaagagctctgggggggccggaaagtctccctggagaaggccgtaatatctgggccttggaaggaaggacacagggctctggaaggaggaggctgcatgcctgaaggctgggccttcgaccctggggatgggccacagggcaccaaacacatcatatgtctctctctttctattttggggtcccagggttttcatttcctggagacccgtggtctgtgtgcactggagcagagccaggctctcagttgcagcagggaaaagcctacatggggaactgcctcccgcaagctgtggtgtgagaagagccctggctggcagcaggagctgtgaagtttcatcccagccgggtgcatttagtagctgcctgaccatcttcctcccaggccctcagtttcttcatctgtagaatgagcagataggggccacagcagggattttcacacatcaaaggaggcagcctctgctctagttgatgtgaggatgagggggcggcctagaccccctgctgcccaggccgttgaggcaacactgggttcctggcttgacagctgtgggctggctgcccttgccagctcagacggctggcgagttttcagcttccctaagggactggcatagggttttgtggggtcaatgccaggaacctgggggaaactggatgcgttttatcctaagaagttcatccctcctgctcttactgtttccggccctggaggagaatgagggaggagagggttttctatgactgtgttagcttttattattagcaagagggctccttttgtaatttgtgcatgaaattcatgtcatttcctgggagaggagagggccgactggagagggtggggggcacactggggaagcaggcagaggtttccttcccttgtaggggggtggggagagtggggagagggggtgctatccagttcgcctgatgagggctctcgaaccagccgttttgggttgtgttaaaggtgagaccttcctccattaatgtacaatctcgaactaactgctaataaagtggggttctgtttgta

SEQ ID NO: 225 - DNA, 7978 bp, Homo sapiens
caggagcttaccaggctggcttgctctgagctgcggttactgtgtccaggccccgggttctcagaactgtcatacataaagtacacagaaatgaagagaaaagtcgtgaatactcacaagctgagattgagtcctaatgaggaagccttcattttgaaggaagattatgaaagaaggcgaaaactaagattgctacaggttcgagaacaagaaagagatatcgccttacagataagagaagacataaaacagaggagaaatcaacaatttacacgtttggcagaggagctaagggcagaatgggaagaatcacaaactcagaaaatacagaacttggaaaaactgtatttggcaagtttaagaagtatgggagagggacatcgacaggccaaagaaaatgaacctgatttggatgctttggcacagcgggcagcagaaaggaaaagaaaagcagatttgaggcataaagaagccttgaaagtacagaaaaatcaaaaagaaatattactgaaacaaaaaacctggcatataaaagctcgaaaggaagcactgcttgtggaaaaagagagatcagccaaaattacaagtctgccacctcctcctccaactctttttgagaacatcgaagtaaaaagaatttctgcagtcaaaaccaatagttctacctaccatcatcttcacacttttgtgaatagagagacagacacaaaacggccagatgctcgtttggctgctgaagaggaagctaaacgattggaagaactacaaaaacaggcagcacaagagagaatggaacggtttgaaaaggcacatgtacggggattccaagcaatgaagaagatccatttggctcaaaatcaggagaaactaatgaaagaactcaaacagctacagcaagaggacctggcacgtaggagacagactgtagcacaaatgccaccacaactagttgaacttccatacaaacgcagtgaaatgaaagaagactggcagagagaattggaatttgcctttgaagatatgtacaatgcagacaggaaggtgaaagggaatctgattctgcaccttgaaccagagcccttgcccactgtgactaatcagatccaagatgaagagctggacctttcaatggaacaagaaaatttgggtgcagctgaagaccttccagtgacagaagctgaaatatgttctagtgaaacagatgttcccttggtaatgaagacccaacagattccttcaaaagttctttttaaaaaattattaaataagatccgaagccaaaaatctctctggacaattaaatctatgtctgaggatgaaagtgaaatgattacgactgttagtgaaattgagagtaaagcaccaacggttgagtcaggaacaattgccagcaaagagagaacgttatcctctgggcaggaacaagttgttgaaagtgatacactaacaattgagtctggaccacttgctagtgaagataaaccactttcgtgtggtacaaactctggaaaagaacaagaaataaatgagactctgcctatcacaactgtagctcagagttcagttctacttcatcctcaagaagcagcagccaggattagaatgtcagcaaggcagaaacagataatggaaatagaagagcagaagcaaaagcaattggaattacttgaacaaattgaacagcagaaattaagattagaaactgactgcttcagggctcagctggaagaagaaaaaagaaaaaaaactcaaccgactggggttggcattgctccagcatcatgccctgtaatttctgatgaagatagtcataggcagatgattcgtaactatcaacatcagcttttacaacaaaacaggttacacaggcagtctgttgaaacagccaggaaacaattacttgaatatcaaactatgttaaaaggaaggtgcccatcggtgtcagctccatcattgataactgattctgttatatcagtgccatcatggaaatctgagagaccgactgctatatcagagcattgggatcaaggtcagagactcaagttgagtcctaacaaataccaacccatacaacctatacagacctccaaattagaacaagatcattttcaggtagcgagacaaaatcactttccacaaagacaggtggaaacaacagaaacattacgcgcttcagatattttaaccaatcaagctttagaatcacaagaacatctaaggcaattctctcagactgaaacacaacagagagactataaattggtccccaaagattctgagacactttcaagggctttgtcacatgacaggcagctaatatcacaggatgctagaaaaatatctgaaacatttggggcaacaacttttcaaagtttagaatcccaacaattgttctcagagaatagtgaaaatatatcttaccatttaactgaaccttcttcatttgtaccactggtacctcagcattcttttagttctctgcctgttaaagttgagtcaggaaaaattcaagaacccttttcagccatgagcaaaagtacagtttccacaagccattctataatcagccaaatgcatgataggcctttgctgccgtcagagaatatcacagcccagcaaggtaatatgaaggccctccaagaacagttagacctacagaagaaagttcttcaggcaactcaggaagctcaggaacagttgcttttgtgcaaacagaaagaagtggaacagcaaacgggcctctcggtattccttcccttggtaactccagattcatctgctttattgccttctgccaaagcagatttggggagaatccaggaatcttcaccaaccaagaataatattgcagtttcctcagaccatcatgtgatctcacaacttcaggataagcgtttgagtctttcacagcctatcctatcacagcaaaataattttaaatttctccaagagcagttgaatattcagaaggatagccttcaggctaggcgagaagcccaggaagtattgtatgtacataaacagagtgaattggatagaagagtatgttccgaacaggctgagccctctttcccatttcaggtagctcagcatacatttacttcactaccatctgctgatacaaaatctggaaaaatacaggagcaacattcatctaagagcgagaaaggacttgtttcatgccaatctgacatccccatatctcaggatgggtctttgagtttcctacagcagttcctacctctacatgatagtttgaagttgctccaagaacagttgactaaacagagggatactcttcaggctaggcatgaagctcaggtggaattacttttacatagacaaagagatttgggggacagtaagtctgggctggtgagctcttcatcctcaccagtggttgttcagcattcagttgcttcacaagcttctgctaaagctgagcctaggagaattcaggagctttatttatctgagaaggagaatgtaggtccctcctgtcatttgataatcccaacatttcaggataagtctcttagttttccacagcatagcctggcacagcaagaaaatttgacaatactccaagaacagtcacaaatacaaagggtaatacttggtgctaaagaaggaactcaggaatttgtacacacagaaagtgaattggagaaaagaatttcttctgaacagactggcacctcctcatccctttcccaggtggatgaatctgagagattccaggaatgtatatcaatcaagagtgacagtaccattcccttaagccatcctaagatcccaagatgtcaggaaagacttttgagagtttcacaacatatgctacctctacaagataatttggaggaacaccaagcatggctagacactgagaaagaagcctttcatttcagccagaaaacccaagaaaatacatcttctgaacaaactggttcatcttcattcataccccagttggtacagctttcatttacttcgttagcttcagctgagtctggcacaatcctggaacctctttttacagagagtgaaagtaaaattttttcaagccaccttcagatcccacaattgcaggataggcttttgaggatatcgcaacttatccagcctcaacaagataatttgaaggcacttcaagaacagttagctacacagagagaagccatcattctagctagacaagaagctcgggaagaattacttttacatcagagtgaatgggagggaagaatatctcccgagcaggttgacacctcttccttacccctagtaccacagcattcattcgcctcattacctcttaatgaatctgaaagaaaccaagaaccatgttcaattaacagtgataatatagtatcctcaggtcactcagagataccaacattgcctgatgggctgttgggtttatcacatcttgttttacctcaacaagataatttgattgcacttgaagaacacttgcatgcacagacagatttccttccttctattgagaaaacccagaaagaattggttttgtcaaaaccatgtaaatttgaggaaaaggtatcttctgagcattttatccagtctcaccatggtgatttgcaggcacttcaacagcagttagatacacagaagaaagccattcgatctatacaggaagtccaagaagaattgcttttgcaaagattaagtgaattggagaaaagggtatcatctgaacaagtttgctcctcttcatttgtatcccaggtgcctgttgctgactctgaaagaacccagaagtctttcccaaccaaaagtaatgatactcttccctcaagtcatcgtgagattccaagattacaggatagacttttgagtttatcaaagcctattctgcctcagcaagataatatgacagcacaattggatgcacaaagggaagtgatgtattcttatgagaaaccccaggaagaactgtctttaaacaaacaaagaaagttgaacaaaagtgaatctgctgagcatactatcccctctttgtttctacccaaggaaacagagcattcgtttattccactaccttttgcagaagctaaacctaaaagcacttgtgaattgtattcatcccagaatgaacatgcagcccccccaagtaatcctgtgatcccagggtttcaagatagacttttgagtttttcacagtctgtcttaactcagcaagataacttgggacttcagaaacagttggatctacaaagagaagttctgcattatagccagaaagcccaggaaaaattgcttgtacagagacaaacagcattgcagcagcagatacagaaacatgaagagactttgaaggatttctttaaagacagtcagataagtaagcccacagttgaaaatgatttaaaaacccagaagatggggcagctcagagactggtttcctaatacacaagacctagcaggaaatgatcaagaaaatattaggcatgcagataggaacaactctgatgataatcatttggcttcagaagatactagtgccaagcaaagtggtgagcatctggagaaagatctggggagaagatcctcaaagccacctgtagcaaaagtcaaatgtggtttggacttaaaccagcatgaacttagtgctatacaagaagtagagtcaccagcaattggcagaacttctatactaggtaaaccaggtatttatgaagacagagaccccctgcgagtctcaataagccgagaacaaagtttctttgggagcccactggcccatgatccgtttagttgtcttcaactggttggccaagagaatgtctgtggtgatgactatgatgaagcagttaagctgaaggaatctgttgttgaaaatcatgcagtgttaagttatgctgtggaggaagaacatgcatatttgggtccaactgtgaagccagatgataaggctaaaacactgtcttatgaaccattatcttcagcaactgtttccactgggagccttttaagttatgaaaacacagatttgagccttacagatccagagtcattttcagagcacatggatgatagcaagcaagaatctaccaccagtaaagaagaggaaacaaatattataagttccatagttccttcaacacaagattcagcggcagaactcttcagacgttcataaatctctgttgcctgcagtggatgaaactacatgtggtcacacacactttcagcaaatgatagacaagtacattaatgaagcaaatttgatacctgaaaaaacagatttgcaagaattggaacacatttttcctaatttgcatcatcagctgtttaaacccttagaaccacatccagattttgacttatcatcatcatcctctgggatttctccagacaacagagacttttaccagagatcagattcttcatctgaaagccactgtgctactggattatccaaaagtacagtttatttcacagcactgaggaggaccagcatgcattcttctcttaacacaagtccgaatcaacaacctgacactaacttggctcatgttggagctcacagttttgctacagaaaatattattgggggatctgaacaatgttttgaacagcttcagccagaatattcttcacaggaggagagccagcatgctgatctaccaagtatttttagcattgaagcaagagattcttcccaaggcatgaaaaatcagaactatccctctgaagaacatactgaaatattacaaaacaagaaaaaaattgttcatttccagctttctataggaaacttaagttcagtctacagttcatctgatgaagctaatgtatttgatcagttaaatgtacagcatagcactccatgtggttctaactctagtgagtgctcaacaaaacaccaactagaaagcagaaaggaaagtatgggctttgaagaactatcaaaaagaggggttgttacaatgttacaaagtcaaggactcattgaagataataaaaatgaaacctgtagggttttagacataaatccacaggtagaggaaactgactctcgattatgtgtaagaacagtggagatgggaacttcaattcaggcaccatattccttaactactcaaaatgaaaaatattttgagaattcagctgaaacagacattccaaaaatcaccaaaaaactatctcaactaggagaatcagagctttttgcaagttctggatcattttcattacagagctctataccagtctgggaaacagaaactggccatggtataatggaagaaccagaacttactttaataagcaccactgataccagtattgctgaaatggattttgcaaatttaaccctagaagagaagagcgagaatgaagcaaaatgcttctttcaggtgagtgagtttctgcctcttgtatcagcaacagaagcctcagattatccagctgtatcagaactttccatagaaaaaccaaggacagcatctacagaaacccctcgcaggcttacacctgtaccagggagcttacaagaagcatttataaagaggaaaaaatcatttatggagagatcccaccagaggcagaaagaaataaggaataaaattcatgtctctgaaaattctcaaatcaaaacagttaaagagaaaccatctataagttcatctgtgagtcgtctaaagggcgtgaataaagtcagagcatcttttcctgaagacagaaagactacacaggctctaaggcaccaaaggggtctaaggttatacaatcaactagctgaagtgaaacaacaaaaggaagaaaaaacaaaacaagaagcttatgcccaaaacagagcaagggcaaaagaattccataagaaaacactagagaaacttcgagccaaaaatacatgctgactttctagaaatagtgtaaaggttttttaattgtgtatatgtagcattagacaaaattatttaaagtcaataaattgttattcgagg

SEQ ID NO: 226 - DNA, 2346 bp, Homo sapiens
cggcgcgcgacgtgctttgctgtataaatgcggtggcgcccggcgtagggacacttcggtcctgagcgcttgggagttaggttgtttgccggcgtagcggccagcgcctgagcccgcccttgatcttcgctgtggcatggcggacgaggggaagtcgtacagcgaacacgatgatgaacgcgttaatttccctcaaagaaagaagaaaggccggggtcccttccggtggaaatatggtgaaggaaaccgtaggtctggaagaggcggttctggtattcggtcttcccgccttgaggaagatgatggagatgtggcaatgagtgatgcccaggatggtccccgagtacgatacaacccctataccacccgacctaaccgtcggggtgatacttggcatgatcgagatcgcattcatgttactgtgcggagagacagagctcctccagagagaggaggggctggcaccagccaggatgggacctcaaagaactggttcaagattacaattccttatggcagaaagtatgacaaggcatggctcctgagcatgattcagagcaagtgcagtgtgcccttcacccctattgagtttcactatgagaatacacgggcccagttcttcgttgaagacgccagtactgcctctgcattgaaggctgtcaactataagattttggatcgggagaaccgaaggatatctatcatcatcaactcttctgctccaccccacactatactgaatgaactgaagccagaacaagtagaacagctaaagctgatcatgagcaaacgatacgatggctcccaacaagcccttgacctcaaaggcctccgttcagacccagatttggtggcccagaacattgacgttgtcctgaatcgcagaagctgtatggcagctaccctgaggatcattgaagagaacatccctgagctattgtccttgaacttgagcaacaacaggctgtacaggctggatgacatgtctagcattgttcagaaggcacccaacctgaagatcctaaacctttctggaaatgaattgaagtctgagcgggaattggacaagataaaggggctgaagctagaagagctctggctcgatggaaactccctgtgtgacaccttccgagaccagtccacctacatcagcgccattcgcgaacgatttcccaagttactacgcctggatggccatgagctacccccaccaattgcctttgatgttgaagcccccacgacgttaccgccctgcaagggaagctattttggaacagaaaacttgaagagtctggtcttgcacttcctgcaacagtactatgcaatttacgactctggagaccgacaagggctcctggatgcctaccatgatggggcctgctgttccctgagcattcctttcattcctcagaaccctgcccgaagcagcttagccgagtatttcaaggatagcagaaatgtgaagaagcttaaagaccctaccttgcggttccggctgctgaagcacacgcgtctcaacgttgttgccttcctcaatgagttgcccaaaacccagcacgacgtcaattccttcgtggtagacataagcgcccagacaagcacattgctgtgtttttctgtcaatggagtcttcaaggaagtggacggaaagtcccgggattctttgcgagccttcacccggacattcattgctgttcctgctagcaattcagggctatgtattgtaaatgatgagctatttgtgcggaatgccagttctgaagagatccaaagagccttcgctatgcctgcacccacgccttcctccagcccggtgcccaccctctctccagagcagcaggaaatgttgcaagcattctctacccagtctggcatgaacctcgagtggtcccagaagtgccttcaggacaacaactgggactacaccagatctgcccaggccttcactcatctcaaggccaagggcgagatcccagaagtggcattcatgaagtgatcgtagtcatgcctcagaagcagtcccccctgtaaatagtccttggatattaccgtctggttgtcgtctgtcatctcctcctgtctggcccgaggccgccccgtgactgtgaccgagggagggagggctgcctgatccctctcctcgcctgccttctggaagacttcagaagattgagcctcactggtgccaggaagccaaagcttactttgtagaactgacactaaactacccgaaggacttaggtgctttgtgtacttaaccccaggacctccttactttttaatataaagagtgatgttgtatttcgtgttctgcactttttaatataaagagtgatgttgtatttc

SEQ ID NO: 227 - DNA, 1691 bp, Homo sapiens
aggggcgggcagccaggggcacttccgctggcccaagtgatctgcatgtggcagggctgcgcagtggagcggccagtgggcaggatgacgagccagacccctctgccccagtccccccggcccaggcggccaacgatgtctactgttgtggagctgaacgtcgggggtgagttccacaccaccaccctgggtaccctgaggaagtttccgggctcaaagctggcagagatgttctctagcttagccaaggcctccacggacgcggagggccgcttcttcatcgaccgccccagcacctatttcagacccatcctggactacctgcgcactgggcaagtgcccacacagcacatccctgaagtgtaccgtgaggctcagttctacgaaatcaagcctttggtcaagctgctggaggacatgccacagatctttggtgagcaggtgtctcggaagcagtttttgctgcaagtgccgggctacagcgagaacctggagctcatggtgcgcctggcacgtgcagaagccataacagcacggaagtccagcgtgcttgtgtgcctggtggaaactgaggagcaggatgcatattattcagaggtcctgtgttttctgcaggataagaagatgttcaagtctgttgtcaagtttgggccctggaaggcggtcctagacaacagcgacctcatgcactgcctggagatggacattaaggcccaggggtacaaggtattctccaagttctacctgacgtaccccaccaaaagaaacgaattccattttaacatttattcattcaccttcacctggtggtgatcctcaggagcagagactgttatgaattctggcgtggcttatgaaattaaaagttgccatcaaagccattttcttttaatttcacaaacatcaggcaatttccagggttggtctagagtcttgccactaaatattgatcactcgtttaaggactttccactccattgcaactgatgccactatatttgcctagcaacttgcagctacttccttttcaaagcctcatgtatctcccagacccttctcttgaagtccaataacaagaccaagtaagaatgtttcaacaatgcgttggcaagagatgtgagatgacaacaggaacatacaagatactgtgaatctagatgttctgacctaaagatgtagtctacatagccccagcttggggtccaatccatctgtccctggcatgtgccttcatgtagtaggtgctttcctgatcccctttgcgagatgctgtgggtgctaacacctcagagctgtcctcttctctagagtggaggttttcaaagtgcatcatcagcattacctgtgaacttgctggaaatacaaatcctcaggccccacctcagacctactgaatcagaatctctgggggttggcacagcattctgatttaccaaaccctccaagtgattttgatgtattctaattttgagaccatctctagaaaagaattgctacctcttgtatggaggtacaaaagactgacctcttacatcaaggaacttcctttcccagagctcctcatggaatcaagctgaagtcagtcttcttctgagagcacattcttactcagtttttttcctctgtcctacgctgcttccctcactccccttctcctaagagcactccatcaataaaccacttgcacgaga

SEQ ID NO: 228 - DNA, 1657 bp, Homo sapiens
actgttgagcaggcctctctgcctgtggccttccggccggtttccagacgcccaggtggccaacattagagtccgcgtagcagtgtgagattgcaagttcacctgccactaccgctgccgcgcgctcgtctgcctggactgttgcgggccccgggacctgggctgggaacccgcggtggagcgggacacgaacgtggacgagcctgtggagtgggagacacctgacctttctcaagctgagattgagcagaagatcaaggagtacaatgcccagatcaacagcaacctcttcatgagcttgaacaaggacggttcttacacaggcttcatcaaggttcagctgaagctggtgcgccctgtctctgtgccctccagcaagaagccaccctccttgcaggatgcccggcggggcccaggacggggcacaagtgtcaggcgccgcacttccttttacctgcccaaggatgctgtcaagcacctgcatgtgctgtcacgcacaagggcacgtgaagtcattgaggccctgctgcgaaagttcttggtggtggatgacccccgcaagtttgcactctttgagcgcgctgagcgtcacggccaagtgtacttgcggaagctgttggatgatgagcagcccctgcggctgcggctcctggcagggcccagtgacaaggccctgagctttgtcctgaaggaaaatgactctggggaggtgaactgggacgccttcagcatgcctgaactacataacttcctacgtatcctgcagcgggaggaggaggagcacctccgccagatcctgcagaagtactcctattgccgccagaagatccaagaggccctgcacgcctgcccccttgggtgacctcttgtacccccaggtggaaggcagacagcaggcagcgccaagtgcgtgccgtgtgagtgtgacagggccagtggggcctgtggaatgagtgtgcatggaggccctcctgtgctgggggaatgagcccagagaacagcgaagtagcttgctccctgtgtccacctgtgggtgtagccaggtatggctctgcacccctctgccctcattactgggccttagtgggccagggctgccctgagaagctgctccaggcctgcagcaggagtggtgcagacagaagtctcctcaatttttgtctcagaagtgaaaatcttggagaccctgcaaacagaacagggtcatgtttgcaggggtgacggccctcatctatgaggaaaggttttggatcttgaatgtggtctcaggatatccttatcagagctaagggtgggtgctcagaataaggcaggcattgaggaagagtcttggtttctctctacagtgccaactcctcacacaccctgaggtcagggagtgctggctcacagtacagcatgtgccttaatgcttcatatgaggaggatgtccctgggccagggtctgtgtgaatgtgggcactggcccaggttcataccttatttgctaatcaaagccagggtctctccctcaggtgttttttatgaagtgcgtgaatgtatgtaatgtgtggtggcctcagctgaatgcctcctgtggggaaaggggttggggtgacagtcatcatcagggcctggggcctgagagaattggctcaataaagatttcaagatcctc

SEQ ID NO: 229 - DNA, 2128 bp, Homo sapiens
gatcaagcgccttcctttcccttcctctccccacttggcctttgccctaagccaagacctggccatcagcctggctgcaggggcctgcagagccagctgcactttttcaggtatgggggagggccaggcaccatgaagccagtgtgggtcgccacccttctgtggatgctactgctggtgcccaggctgggggccgcccggaaggggtccccagaagaggcctccttctactatggaaccttccctcttggcttctcctggggcgtgggcagttctgcctaccagacggagggcgcctgggaccaggacgggaaagggcctagcatctgggacgtcttcacacacagtgggaaggggaaagtgcttgggaatgagacggcagatgtagcctgtgacggctactacaaggtccaggaggacatcattctgctgagggaactgcacgtcaaccactaccgattctccctgtcttggccccggctcctgcccacaggcatccgagccgagcaggtgaacaagaagggaatcgaattctacagtgatcttatcgatgcccttctgagcagcaacatcactcccatcgtgaccttgcaccactgggatctgccacagctgctccaggtcaaatacggtgggtggcagaatgtgagcatggccaactacttcagagactacgccaacctgtgctttgaggcctttggggaccgtgtgaagcactggatcacgttcagtgatcctcgggcaatggcagaaaaaggctatgagacgggccaccatgcgccgggcctgaagctccgcggcaccggcctgtacaaggcagcacaccacatcattaaggcccacgccaaagcctggcattcttataacaccacgtggcgcagcaagcagcaaggtctggtgggaatttcattgaactgtgactggggggaacctgtggacattagtaaccccaaggacctagaggctgccgagagatacctacagttctgtctgggctggtttgccaaccccatttatgccggtgactacccccaagtcatgaaggactacattggaagaaagagtgcagagcaaggcctggagatgtcgaggttaccggtgttctcactccaggagaagagctacattaaaggcacatccgatttcttgggattaggtcattttactactcggtacatcacggaaaggaactacccctcccgccaggggcccagctaccagaacgatcgtgacttgatagagctggttgacccaaactggccagatctggggtctaaatggctatattctgtgccatggggatttaggaggctccttaactttgctcagactcaatacggtgatcctcccatatatgtgatggaaaatggagcatctcaaaaattccactgtactcaattatgtgatgagtggagaattcaataccttaaaggatacataaatgaaatgctaaaagctataaaagatggtgctaatataaaggggtatacttcctggtctctgttggataagtttgaatgggagaaaggatactcagatagatatggattctactatgttgaatttaacgacagaaataagcctcgctatccaaaggcttcagttcaatattacaagaagattatcattgccaatgggtttcccaatccaagagaggtggaaagttggtacctcaaagctttggaaacttgctctatcaacaatcagatgcttgctgcagagcccttgctaagtcacatgcaaatggttacggagatcgtggtacccactgtctgctccctctgtgtcctcatcactgctgttctactaatgctcctcctgaggaggcagagctgagacaggattatcaattttggagcttcataagagaatcttcaggatcttcctcccttttctgctttgagggtttccatacattgctgttttcaggttctacaataattacctttttttctctttctctttttggcttgtgctgggatttaagaattagaaaataaaaataagcagaaattaaaaaaaaaaacacttgtaatctcacccctcctaaagttaatgttaagattttgctgtatataatgaatgtatattatgaattatttacaaaaatggcatcatagtatacaaa

SEQ ID NO: 230 - DNA, 2570 bp, Homo sapiens
taatcgtattcagcatgttttgcacaagaaatgtcagccagaaagggctatctgctcccttcgccaaattatcccacaacaatgtcatgctcggagagccccgccgcgaactcttttttggtcgactcgctcatcagctcgggcagaggcgaggcaggcggcggtggtggtggcgcggggggcggcggcggtggcggttactacgcccacggcggggtctacctgccgcccgccgccgacctgccctacgggctgcagagctgcgggctcttccccacgctgggcggcaagcgcaatgaggcagcgtcgccgggcagcggtggcggtggcgggggtctaggtcccggggcgcacggctacgggccctcgcccatagacctgtggctagacgcgccccggtcttgccggatggagccgcctgacgggccgccgccgccgccccagcagcagccgccgcccccgccgcaaccaccccagccagcgccgcaggccacctcgtgctctttcgcgcagaacatcaaagaagagagctcctactgcctctacgactcggcggacaaatgccccaaagtctcggccaccgccgccgaactggctcccttcccgcggggcccgccgcccgacggctgcgccctgggcacctccagcggggtgccagtgcctggctacttccgcctttctcaggcctacggcaccgccaagggctatggcagcggcggcggcggcgcgcagcaactcggggctggcccgttccccgcgcagcccccggggcgcggtttcgatctcccgcccgcgctagcctccggctcggccgatgcggcccggaaggagcgagccctcgattcgccgccgccccccacgctggcttgcggcagcggcgggggctcgcagggcgacgaggaggcgcacgcgtcgtcctcggccgcggaggagctctccccggccccttccgagagcagcaaagcctcgccggagaaggattccctgggcaattccaaaggtgaaaacgcagccaactggctcacggcaaagagtggtcggaagaagcgctgcccctacacgaagcaccagacactggagctggagaaggagtttctgttcaatatgtaccttactcgagagcggcgcctagagattagccgcagcgtccacctcacggacagacaagtgaaaatctggtttcagaaccgcaggatgaaactgaagaaaatgaatcgagaaaaccggatccgggagctcacagccaactttaatttttcctgatgaatctccaggcgacgcggttttttcacttcccgagcgctggtcccctccctctgtcttcaggctctgcccaggaactcgcacctgtgctggagccctgttcctccctcccacactcgccatctcctgggccgttacatctgtgcagggctggtttgttctgactttttgtttctttgtgtttgcttggtgctggtttatttgttgttttctgggggaaaaagccatatcatgctaaaattctatagagatagatattgtcctaagtgtcaagtcctgactgggctgggtttgctgtcttggggtcccactgctcgaaatggcccctgtcttcggccgagctggtttcctgcccagcctggggcaaacctagccggaaggccgaggtcccattgttggcgctgaggtgtctggcctgaggtcaatggtgcaaaggagccgccaccgggcatgtctgcctggagtgctgtgctgtgtttaatcaggggatacaggcccctgggtttcttttttctttcttcctttcttccttggccaagagaagggcttacaggcatggacatgcaggttggcaaacgggcttgactttggctgatttaaaaagtgagaaagaaagtaaaaaaggttaatttttccttcctctgtaagatatcccagctttaaaaagaaaaaaaaagaattaccaagagaaggggacttctcttccagtttctgtaaggtcttacattgcctgactaaaatgtttcatttacctctaaatttccatatccttctggctgtagataaataatgtagttttgtttatgcatttggaattagtggatttttttgtcattaaaattgttaccactggtaacatgtgacaagcacaccacaattctccctatcttgtgaagttgtttttttaaatcgccttgaacaaaaagttttttttttgtttgtttttgctttctgaaattcacagaagcctaggaggactggggtaagcggaataaactagagaagggagacattgtttggatttcctttatactgtgaagttacatgcataaaagggtcaaacctgtagatgcagaaaaagaaaaaaactataaatacaaatctgtataaatgtctattattatgaagaattgccaatcttgttttaagcaaatgcattctatcgttattataaatgttagttctagctctatttacttctaatcttaaatcagaataaattaatattgtattgctgctgtgcgtggaaaaagacgatgtttatgttcttatagaataaaagctgtggaatgaagctttttaatttt

SEQ ID NO: 231 - DNA, 1915 bp, Homo sapiens
cactaaggcgcaaggcagctgcacatccacggccagcctcgttgtcttcagggatttgttcaaagttcattctgaattgtaaggtaaccactgcagaacacgagcctttcctgggtatgtgtggttatttctgcccttcacggtcccactcaagtcctgcctccctcagggagacctcccagacctcaccaagccgtgggcacgtggaccagaagccgtggaccccagaggctcatttagggatctgctttctgaacccaggtcctaacatctgcactgcagcgagcatttctggtgcctcaagtgagtcactccaacttccagctcactgagaggcgatggagcactgagtgccagcatcttccagcaccagaggagctgactctgaatagacagctcggcagcggcctcagcacagagcaggggagccaccagccacaggcagccactgagcccttggcatgtaacccggtaacccatgcaacagaagacctgagcgtccagtgttgctagcttgaagtaacttcagtggtgttccccagcgtttttctcatccccctcccttcccttcccctacagctttcttcctctttcccctccttctgagtcttttgtccccagtcctgggaaccttttttctgacttggtgttttctcctgaatgcctccttcctggccccctaatcagaaatgcagaagccacctgccccacacagggggccgctttccctgcatctggcactcaccaggacagtcatagaactggccttgggtgcttggggagagtggagaggtctggggggcatccactggcctcagcctcagagcttctcatcagtaacccaggaggcaaaggcccagctcgagattagcccaggccactgtatctgtgccaagacctacagctgtccctgcagggcgtgcatctcctgcagcccaggctatcacaatggtgtcccttttggtggggatgtgaggcctgctgcctgcctgggaagaagctgacaggattgttggtgctgtggggagaagctggtgtaactgagacccatgagggaggccctttgtgggtctgtggctgggaggagctctggggaagatgggccttgagaaatcccagcttagcacctttgacagttgctccactgagtcaccctagactgcaatctcacagatgttctaaccaccctctccctggggagcccttgggggtgctgcaagcccagtcctcactcactggctttgtgcttctcttcccgacttcctttttttgctcctgttgagaaatgtgggtccagggctgcgtgctccagtgtgcggaaggaagggcagcgtgctctttggactgagctggctcaagggaagctgggtctgaggggagactgacctcgacccttcttaaatgaaacaccttttccctgcgtctcagtcaccagttacctggcctgatcactgtgtgccacaccccatcacatccatccccacaagaatgccaggaggaggggtcattggcctttttgccagcacaaacctctggaggccagctcccaagacccgccaggcacacctgccagagtgccttaacttgggatgtctgcaaacctctgtccatggccgaacccaccccactgcctgttactgtaaataaaggtctattagcatgccaccatgcccctcctccgatgcatacagtgcccagctcagcacctggtgcaaagtaagcacaatctggcttccagccatcactgctgttgctactatcacaaatattaggccccttctagaatgcaaagataacccagggctgctcgttctgtgtccagatcacagagtttttctttttatccttatcaactttattgagggataatttacaggcaataaatcatatccatttaaaaaaaaaaaaaaaaaaa

SEQ ID NO: 232 - DNA, 6467 bp, Homo sapiens
ggggggagtcggcgtctctctcccccgcgccagctcccgtacacggagccgcattccttggcccccccacccccctccctcggggcccccccgcccccctcgggaaaaaaatccaccccgaatcactcgaacccgagggaggcttcctttcacccttggggagacgagctttcaacggttacctcttcttcgtctccccccaagcccccgtcccctccccctgctcccacccccttctggcgccgggtgtaaggtccctttaaggcgacggcgccttcctcgggtcagactaccggcggcgacgaccacaggagcatggcggacaccgacctgttcatggaatgtgaggaggaggagttggagccatggcagaaaatcagtgatgtcattgaggactctgtagttgaagattataattcagtggataaaactaccacagctggcaatcctttggtccagcaaggtggacagccactcatcctgacccagaatccagccccaggtctgggcacaatggttactcaaccagtattgaggcctgttcaggtcatgcagaatgccaatcatgtgactagttcccctgtggcctcacaaccaatatttatcactacgcagggatttcctgtaaggaatgtccggcctgtacaaaatgcaatgaatcaggttgggattgtgctgaacgtacagcaaggccaaacggttagaccaattacactagttccagccccaggtacccagtttgttaagccgacagttggagttccacaagtgttctcccagatgacccctgtgaggccaggctccacaatgcctgtgaggcccaccaccaacaccttcaccaccgtcatcccggccactcttaccattcgaagcaccgtcccacagtcccagtcccagcagaccaagtccactcccagcacttctaccactcccactgccacacagccaacctcactggggcaactagctgttcagtctccaggccagtcaaaccagaccacgaatcccaagctagctccctccttcccctctccacctgcagtgagcattgccagctttgtcactgtgaagcgacctggtgttacaggcgaaaatagcaatgaagtggccaaattggtgaatacccttaacaccatcccttccctgggccagagtcctgggccagtggtggtgtccaacaacagctctgctcatggctctcaaagaaccagcggacctgagtcttcaatgaaagtgacctcttccatcccagtatttgacctccaggatggtggacggaaaatatgtccacgatgtaatgctcaatttcgtgttactgaagctttgagaggtcacatgtgttactgttgcccagaaatggttgaataccagaagaaaggaaagtccctggattcagaacccagtgtcccatcagcagcaaagcccccatcccctgagaaaacagctcctgttgcttccacaccctcttctacacctattcctgctctgtcaccgcctaccaaagtaccagaaccaaatgagaacgtgggcgatgccgtccagaccaaactcattatgcttgtagatgacttctactatggacgggatggtggcaaagtagcccagctcacaaatttccctaaggtcgccacatctttccgatgcccacattgtaccaaaaggctaaaaaacaatattcgattcatgaaccatatgaaacaccacgtagaactcgatcagcagaacggtgaggtagatggtcacactatctgccagcactgttaccgccagttttccactcccttccagcttcagtgccacttggaaaatgttcatagtccctatgaatctactaccaagtgcaagatctgtgaatgggcgtttgaaagtgagccactatttctccagcatatgaaggatactcataagcctggagagatgccttatgtttgccaggtgtgtcaatatcgctcctcactctactctgaggtagatgtccattttcggatgatccatgaggatacccggcatctgctctgcccttattgcctgaaggtcttcaaaaatggcaatgcattccaacagcattacatgaggcaccagaagagaaatgtttatcactgcaacaaatgccggctgcagtttctctttgccaaggacaaaattgaacacaagcttcaacaccataaaaccttccgtaaacccaagcagctggagggcttgaaaccaggcaccaaggtgacaatccgggcttcccgagggcagccacgaactgttcctgtatcctctaatgatacacctcccagcgccttgcaggaggcagcaccgctgacctcctcaatggaccctctgcctgtcttcctttatccccctgtccagcgcagcatccagaagagagctgttaggaaaatgagtgtcatgggccggcagacatgcctggagtgcagcttcgagatcccagacttccctaatcatttccctacttacgtacactgctctctgtgtcgctatagcacctgctgttctcgagcttatgccaaccacatgatcaacaatcatgttccacggaagagccccaagtatttggctttgtttaaaaattctgtgagtggaatcaagctggcctgcacttcatgtacctttgttacctctgtgggcgatgctatggccaagcatttggtattcaacccctctcacagatccagcagcatcctgccacggggactcacttggatagctcactcaaggcatggccagactcgtgaccgagtgcatgaccggaacgtgaagaatatgtaccctcctccttccttccccactaacaaagctgccactgtgaaatctgcgggggccaccccagctgagcctgaagagctactaactcccttagccccagcactcccatcaccagcctcaactgcaaccccaccaccaacccccactcacccgcaggctttagcccttccaccgctggctacagagggagccgaatgtctgaatgttgatgatcaggatgaagggagcccagtcacccaagaacctgagctagcatcaggtggtggtggtagtggtggagttggcaaaaaggagcagctgtctgtgaagaagcttcgagtagtactgtttgctctatgctgcaatacagaacaggcagctgaacacttccgaaatccccagcgacgtattcgccgttggcttcgacgtttccaggcctcccagggggagaatctagagggcaaatatctgagctttgaggcagaagagaaactggctgagtgggtgctaacccagcgcgaacaacagctacctgtaaatgaggagaccttgttccagaaggccaccaaaataggacgttctttggaaggggggtttaagatctcctatgagtgggctgtgcgtttcatgctgcggcaccacctgactccccatgcccggcgagctgtggcccacaccctacctaaggatgtagcagagaatgcaggactcttcattgattttgtacaacggcagattcacaaccaggacttacccttgtctatgattgtggctattgatgagatctctttgttcctggatacagaggtgctgagcagtgatgatcgaaaggagaatgccctgcagacagtgggcacaggggaaccttggtgtgatgtagtcctagccattctggcagatggcactgtccttcccaccctggttttctacagagggcagatggatcagcctgctaacatgccagactccatattgctagaggcaaaggagagtggctacagtgatgacgagatcatggagctgtggtcaactcgagtgtggcagaagcacacagcttgccagcgcagcaaaggcatgcttgtgatggactgtcatcgcactcacttgtcagaagaggtactggctatgcttagtgcctctagcactttgcctgcagtggtcccagcaggctgtagctccaaaattcagccattagatgtatgcatcaaaagaactgtcaagaacttcctgcataaaaaatggaaggaacaggctcgggaaatggcagatactgcatgtgattctgatgtcctgcttcagctggtgcttgtctggctgggtgaagtgctaggtgtcattggggactgtccagagctagttcagcgctccttcctggtggctagtgttctgcctggccccgatggcaacattaactcacctacaagaaatgctgacatgcaggaggagctaattgcctccctagaggagcaactgaagctgagtggggaacattctgagtcttccactccacgacccagatcatctcctgaagagacaattgagcctgaaagtcttcaccagctctttgagggtgaaagtgagaccgagtctttctatggctttgaagaagctgacctagatctgatggagatttgagtgttggggtcatgagggggtgtggagtgagggtgggaacatgtgagggagggtaaaggggcttagggaaaagggggcataccaggtggggtatttggtttctattttttaattttataccaccactcccccctgaagttgacttacacttccctgtggatttgtggattaattaggaaaaccaatagtaatcacgtctgagccaaggagctggcccattggtcattcacttctgctaaaaacaggtttttgtgactttttttttttttaaatttaaatcactgtgtttggtatttttctgacaaaattaagaaaaagaaaaaaaattatttgtgggcaaatgttaaatttttttgtttccccttttacctcaattgtatcatagtactgggtttttttgtttgttttattgtgtggccaatgtctttgggcatgatgctatctaatcattgttaatgtgagaacatttctgaagatgggaaagacaaattatgtagctcacaaactggtttattatatatatggataaaaaacttttttcattgtggtcttaacacttttatataaaaatgaaaatggaaaaaaagtcccactgaactctctcttccttctccttttctttccttccctctccagagatgttggtttctacagcaaccctagatataaaattgtggctttaaaaatgcatgaaaccacctttaattatccagaatgaatagatttgtcttttcctcaccaccttccctccaaaacatgacataaacaatattttttgcacttgtgatccttggcccctttccccattctcaacaccatccatccctctggacaaaggatcatacaggtgttattagcaagcaagagatactgaagcgatcaaacagttttagggtggaagccattcccagtttgagtcttcatcctgtaagcccccaggggcagtccctgctttactgaacttcatcctgttagatggagagcatgcctgtttaagggattactggtcctacagccaggagctaattgttcaagaagtgttgaactttaaaaagacaagaccacttgttgaaatccagcgtgctctgtggctttcccctatttctcttaatacttagggaagaatctgacaggaagaagcgcacaggggtgtgcacaaagaaaatgacatgaatctttatttttcactgccagcttcaaggaaagaaaattttttctacaatttgcatgagggatttttttaattgtatgtactcatggttgtaaaccaaaacgtactgtaccgtacagagaaaaggagcaaaaaaccaagtcttctgtttatcctgaggctttccacaatgttcccctcctgtgagccaaggaggcaaactgcacaagcttgtaaatggttcgtctttaaaatgtacataagtggaacatttaataaaatgaggggaaatggatttataaacttgttttttttctaggtgaccctgtttaataggctttcacagactggggaatgctcaagatgtgatgggcctggtggtacaggtgtgacatttgttaccacccatttctcccaccccaccctgcttttttgtttgtttgttttttcatcccccagcacactataatatagtgaactggaaaagtcccttccagaaacagcttggccagctttgtgaacctttgacatctgaaaacaaccaaggatccatctgggcttctcttccccagctttttgcctgatgccattttattgacagacaatggactttgaagtcagcctttgcctttgagaaagttcaagaactatggttggtcacgtctatctacaacctaatcctactctttggtagtctctgcagcagccacagccttagcagagctggggttcctgtcttctgcacacgattgactttcttgatgggtaattttttttaagattataccaacagtggatcagctgggttttggccaggaagttgtctttgtggactctgcctgcatggcttagtagtagaaggaaatttttttttggttttgttttttataattcagtttaatcaataaacatgtatttattgactgtt

SEQ ID NO: 233 - DNA, 3399 bp, Homo sapiens
gctggggctcggggctcggctctgggagagctcgggcgggagcccagagagagccgcacggggacctcaagccagaccccagcgttcagccgccacctcggcccgggcccgccccgccccggccccgcccctttcctgcccgccccaccccctctacgcccctccacccggaccccgccccctgggcagccccccgccctctccgcccgggctccgccccctccccctggccctcgccaccggtccagggaggggacggcgggacaggcgggaccagtgggaccggcgggagggctgacagggcggggacatggccgcggcgccgggagggtcagcgcagcccgctggccccggcccgcgcctgggtttcagcaccgcggacagcggcgtcggcatgagcgggctaaaccccggtcccgccgtacccatgaaggaccacgacgccatcaagctcttcgtggggcagatcccgcggggcttggacgagcaggacctcaagccgctgttcgaggagttcggccgcatctacgagctgacggtgctgaaggaccggctcaccggcctccacaaaggctgtgccttcctcacctactgcgcccgggactctgctctcaaggcccagagtgcactgcacgagcagaagaccctgccagggatgaatcgtccgatccaagtgaagccagctgccagtgagggccgaggagaggaccgaaagctgtttgtggggatgctgggcaagcagcagggtgaggaggacgtcagacgcctgttccagccctttggccacatcgaggagtgcacggtcctgcggagtcctgacggcaccagtaaaggctgtgcctttgtgaagttcgggagtcaaggggaagctcaggcggccatccggggtctgcacggcagccggaccatggcgggcgcctcgtccagcctcgtggtcaagctggcggacaccgaccgggagcgcgcgctgcggcggatgcagcagatggccggccacctgggcgccttccaccccgcgccactgccgctaggggcctgcggcgcctacaccacggcgatcctgcagcaccaggcggccctgctggcggcggcacagggcccaggcctaggcccggtggcggcagtggcggcccagatgcaacacgtggcggcctttagcctggtagctgcgcctctgttgcccgcggcagcagccaactccccgcctggcagcggccctggcaccctcccaggtcttccggcgcccatcggggtcaatggattcggccctctgaccccccagaccaatggccagccgggctccgacacgctctacaataacgggctctccccttatccagcccagagccccggcgtggctgaccccctgcagcaggcctacgctgggatgcaccactacgcagcagcctatccgtcggcctatgccccagtgagcacagcttttccccagcagccttcagccctgccccagcagcagagagaaggccccgaaggctgtaacctcttcatctatcacctgcctcaggagtttggtgatgcggaactcatacagacattcctgccctttggagccgttgtctctgctaaagtctttgtggatcgagccaccaaccagagcaagtgttttgggtttgttagttttgacaatccaactagtgcccagactgctattcaggcgatgaatggctttcaaattggcatgaagaggctcaaggtccagctaaagcggcccaaggatgccaaccggccttactgacctgctttcactgaccagccacagaaagaaacagaagagtgagaagaaaggagaggaaaagcacagaaacgcttgagcagcccttcccgaaggagcagctgcggacggaggtggatcggacccaaggctggtgcctggggctaaggccactctaaggattgtttttatcaagtgggttgttctgtgcctgcagcatagagcgcaggctggcagagcaaatagggctggtgaggagtgactgtccaggggaaccagcagagggcgttgggggtgccaagggcttctccgcaagggaagcccagatttacttctttcaaaatcatatcattccttagagtttagggaccaaaggactattgcttttttaagaatatatatatctatataaattaaaacaaagaaacaaacaaacaaaaaacaagacaaacaactacaaaaaaagacagtatagagtctcataaaagctgcctttaaatatccctaggagacagggtgaaggagacccttgacagccccagcctaggcagatgggggctgtggaaagattgttctgtgtctcattccctcttaagccactcccccaccctgcccttttaaaaataattaaggatttgaggtctaggctcacatgcaggtaatgagaacgttatggaagcagtgaacccacaatccacaatccccaaactcagagtgcatcccagaagaggccccaggcagagctcaggttggccctggcctttgccatcccgggaggccccctagccagcaagagtgggattgcctttcctgtggaaccactgcttccccaggcgggaagaaagagggagttctggccacctgagcctttcccttgccaatccaggtagacagaggccctgcctttggctgagctgagacacctcctgtttcccttccccttgaaccagtcccagtgtccccttgctccaggctaccttctgtctcttagtctaagtttgcccacctgtaaagtagattcaggatatctgtagagggctgtgacaacagacttggaaggtttgctactgtatatactgccattgagaaggggaaatttttcaatatgtagaagcttcagaattagaggtccctctttaccccagacctgggagggaagtagatgttttgccaaaatacttcttcattcctttaaaaactacatctttcctatgcaagagtgtctcacatgtgcttaaccgaggtgcttctagttggtgagcagtgttgagcttagaagtggtgtgtgctctgtctgtctgtctttgtctgtctgttgtatacagtgggtgccatataaagctgatcaatggtggtgcttcctgcctgcttctgtgagatgggcaaaagattcagcttagaacaccatgactcaccttgccttggtcagcctttcctgggcctgtagggccttgcacatatttttcccaggaggatttcccctccaccccacaggcatggatcagcttggtctgaggccccagctgtgtggggtccctctaatccccagatgttgctgaggctgaaggcctctgatctgataacatgtcagatagtaaaagatgtgggggtgggggtggagggctcctccttcataacagtttctaagaaaacttgttcccacctgt

SEQ ID NO: 234 - DNA, 3939 bp, Homo sapiens
tttagacacaagcgagaggatcatggcggatggccccaggtgtaagcgcagaaagcaggcgaacccgcggcgcaataacgttacaaattataatactgtggtagaaacaaattcagattcagatgatgaagacaaactgcatattgtggaagaagaaagtgttacagatgcagctgactgtgaaggtgtaccagaggatgacctgccaacagaccagacagtgttaccagggaggagcagtgaaagagaagggaatgctaagaactgctgggaggatgacagaaaggaagggcaagaaatcctggggcctgaagctcaggcagatgaagcaggatgtacagtaaaagatgatgaatgcgagtcagatgcagaaaatgagcaaaaccatgatcctaatgttgaagagtttctacaacaacaagacactgctgtcatttttcctgaggcacctgaagaggaccagaggcagggcacaccagaagccagtggtcatgatgaaaatggaacaccagatgcattttcacaattactcacctgtccatattgtgatagaggctataaacgctttacctctctgaaagaacacattaaatatcgtcatgaaaagaatgaagataactttagttgctccctgtgcagttacacctttgcatacagaacccaacttgaacgtcacatgacatcacataaatcaggaagagatcaaagacatgtgacgcagtctgggtgtaatcgtaaattcaaatgcactgagtgtggaaaagctttcaaatacaaacatcacctaaaagagcacttaagaattcacagtggagagaagccatatgaatgcccaaactgcaagaaacgcttttcccattctggctcctatagctcacacataagcagtaagaaatgtatcagcttgatacctgtgaatgggcgaccaagaacaggactcaagacatctcagtgttcttcaccgtctctttcagcatcaccaggcagtcccacacgaccacagatacggcaaaagatagagaataaaccccttcaagaacaactttctgttaaccaaattaaaactgaacctgtggattatgaattcaaacccatagtggttgcttcaggaatcaactgttcaacccctttacaaaatggggttttcactggtggtggcccattacaggcaaccagttctcctcagggcatggtgcaagctgttgttctgccaacagttggtttggtgtctcccataagtatcaatttaagtgatattcagaatgtacttaaagtggcggtagatggtaatgtaataaggcaagtgttggagaataatcaagccaatcttgcatccaaagaacaagaaacaatcaatgcttcacccatacaacaaggtggccattctgttatttcagccatcagtcttcctttggttgatcaagatggaacaaccaaaattatcatcaactacagtcttgagcagcctagccaacttcaagttgttcctcaaaatttaaaaaaagaaaatccagtcgctacaaacagttgtaaaagtgaaaagttaccagaagatcttactgttaagtctgagaaggacaaaagctttgaagggggggtgaatgatagcacttgtcttctgtgtgatgattgtccaggagatattaatgcacttccagaattaaagcactatgacctaaagcagcctactcagcctcctccactccctgcagcagaagctgagaagcctgagtcctctgtttcatcagctactggagatggcaatttgtctcctagtcagccacctttaaagaacctcttgtctctcctaaaagcatattatgctttgaatgcacaaccaagtgcagaagagctctcaaaaattgctgattcagtaaacctaccactggatgtagtaaaaaagtggtttgaaaagatgcaagctggacagatttcagtgcagtcttctgaaccatcttctcctgaaccaggcaaagtaaatatccctgccaagaacaatgatcagcctcaatctgcaaatgcaaatgaaccccaggacagcacagtaaatctacaaagtcctttgaagatgactaactccccagttttaccagtgggatcaaccaccaatggttccagaagtagtacaccatccccatcacctctaaacctttcctcatccagaaatacacagggttacttgtacacagctgagggtgcacaagaagagccacaagtagaacctcttgatctttcactaccaaagcaacagggagaattattagaaaggtcaactatcactagtgtttaccagaacagtgtttattctgtccaggaagaacccttgaacttgtcttgcgcaaaaaaggagccacaaaaggacagttgtgttacagactcagaaccagttgtaaatgtaatcccaccaagtgccaaccccataaatatcgctatacctacagtcactgcccagttacccacaatcgtggccattgctgaccagaacagtgttccatgcttaagagcgctagctgccaataagcaaacgattctgattccccaggtggcatacacctactcaactacggtcagccctgcagtccaagaaccacccttgaaagtgatccagccaaatggaaatcaggatgaaagacaagatactagctcagaaggagtatcaaatgtagaggatcagaatgactctgattctacaccgcccaaaaagaaaatgcggaagacagaaaatggaatgtatgcttgtgatttgtgtgacaagatattccaaaagagtagttcattattgagacataaatatgaacacacaggtaaaagacctcatgagtgtggaatctgtaaaaaggcatttaaacacaaacatcatttgattgaacacatgcgattacattctggagaaaagccctatcaatgtgacaaatgtggaaagcgcttctcacactctgggtcttattctcaacacatgaatcatcgctactcctactgtaagagagaagcggaagaacgtgacagcacagagcaggaagaggcagggcctgaaatcctctcgaatgagcacgtgggtgccagggcgtctccctcacagggcgactcggacgagagagagagtttgacaagggaagaggatgaagacagtgaaaaagaggaagaggaggaggataaagagatggaagaattgcaggaagaaaaagaatgtgaaaaaccacaaggggatgaggaagaggaggaggaggaggaagaagtggaagaagaagaggtagaagaggcagagaatgagggagaagaagcaaaaactgaaggtctgatgaaggatgacagggctgaaagtcaagcaagcagcttaggacaaaaagtaggcgagagtagtgagcaagtgtctgaagaaaagacaaatgaagcctaatcgtttttctagaaggaaaataaattctaattgataatgaatttcgttcaatattatccttgcttttcatggaaacacagtaacctgtatgctgtgattcctgttcactactgtgtaaagtaaaaactaaaaaaatacaaaatacaaaacacacacacacacacacacacacacacacacacacacacaaaataaatccgggtgtgcctgaacctcagacctagtaatttttcatgcagttttcaaagttaggaacaagtttgtaacatgcagcagattagaaaaccttaatgactcagagagcaacaatacaagaggttaaaggaagctgattaattagatatgcatctggcattgttttatcttatcagtattatcactcttatgttggtttattcttaagctgtacaattgggagaaattttataattttttattggtaaacatatgctaaatccgcttcagtattttattatgttttttaaaatgtgagaacttctgcactacaaaattcccttcacagagaagtataatgtagttcc

SEQ ID NO: 235 - DNA, 6855 bp, Homo sapiens
ggtacagcccgcgccgcctctgctgcagccgctgccgtctactccttgcgcgctggcactccgcagcctttaaggttcgcgcgggggccaggcaagagttagccatgaagagcctcaagtcccgcctgaggaggcaggacgtgcccggccccgcgtcgtctggcgccgccgccgccagcgcgcatgcagcagattggaataaatatgatgaccgattgatgaaagcagcagaaaggggggatgtagaaaaagtgacctcaatccttgctaaaaagggggtcaatccaggcaaactagatgtggaaggcagatctgtcttccatgttgtgacctcaaaggggaatcttgagtgtttgaatgccatccttatacatggagttgatattacaaccagtgacactgcagggagaaatgctcttcacctggctgctaagtatggacatgcattgtgcctacaaaaacttctacagtacaattgtcccactgagcatgcagacctgcagggaagaactgcacttcacgatgccgcaatggcagattgtccttctagcatacagctgctttgtgaccatggggcctctgtgaatgccaaagatgtagacgggcggacaccacttgttctggctactcagatgagtaggccaacaatatgtcaactgctgatagatagaggagcggatgttaattccagagacaaacaaaacagaactgccctcatgctaggttgcgaatatggttgcagagatgcagtagaagtcttaattaaaaatggtgctgatataagcttgctggatgcgcttggccatgatagttcttactatgcaagaattggtgacaatctggacattctaaccttgttgaagactgcatcggaaaataccaacaaagggagagaactttggaagaaagggccatctttgcaacagcgaaatttgacacacatgcaagatgaagtaaatgtgaagtcacatcagagggagcatcaaaatattcaggatttggagattgaaaatgaagatttgaaagagaggttgagaaaaattcagcaagaacaaagaatacttttggataaagtcaatggtttacagttacagctgaatgaggaagttatggttgctgatgatctggaaagcgagagagaaaagctgaagtcccttttggcagctaaagaaaagcaacatgaagaaagcttaaggactattgaggctctgaaaaatagatttaaatattttgagagtgatcatttaggatcaggaagtcatttcagtaaccgaaaagaagatatgcttcttaaacaaggtcagatgtatatggcagactcacagtgtacttccccaggtataccagcccatatgcaaagcagatctatgttaagacctctggaactatctttacccagtcaaacgtcatactctgaaaatgaaattttaaagaaagagttagaagcaatgcgaactttctgtgagtcagcaaaacaagaccgactgaagctccaaaatgaactggcacacaaagtggcagaatgcaaagctttagcattagaatgtgaaagggtcaaggaggattcagatgaacagataaagcaattagaagatgcattaaaagatgtgcagaagaggatgtatgagtcagaaggtaaagttaaacaaatgcagacccattttcttgcccttaaagaacacttaacaagtgaagcagcctcagggaatcacagactaaccgaggaactgaaggatcagttgaaagacttgaaagtaaaatatgaaggtgcttcagcagaagtggggaaattaagaaaccaaatcaaacaaaatgagatgatagtagaagagtttaagagggatgaaggcaagctgatagaagaaaataagcgattacagaaggaacttagtatgtgtgaaatggagcgagagaagaaaggaagaaaggtcacagagatggaaggccaggcaaaagaattgtcagcgaagttggccctttccattccagctgaaaaatttgaaaacatgaagagctcattatcaaatgaagtgaatgagaaagcaaaaaaattagtagaaatggaaagagaacatgaaaaatcacttagtgaaattagacagttaaagagagaacttgagaatgttaaggccaagcttgctcagcacgtcaaaccagaggaacatgaacaggttaagagcagattagaacagaaatcaggagaacttgggaagaagatcactgagttaacattgaaaaatcagacactacaaaaggaaattgaaaaagtttatttggataataagctcctcaaggagcaagcacataacttaacaattgaaatgaaaaatcattatgttcctttaaaagtaagtgaagacatgaaaaagtcacatgatgcaattattgatgatcttaatagaaagcttttagatgtaacacaaaaatatacagaaaagaagttggaaatggagaaattgctactggaaaatgacagcttaagtaaggatgtaagccgcctagaaactgtgtttgtacctcctgagaaacatgaaaaagagataatagctctgaaatccaatattgttgaacttaagaaacagctgtctgaacttaagaaaaaatgtggtgaagaccaggagaaaatacacgctctcacatctgaaaacactaacttgaagaagatgatgagtaatcagtatgtgccagttaaaacccatgaagaggttaaaatgacactgaatgacacgttagccaaaactaacagagaattattagatgtgaagaaaaaatttgaagatataaatcaggaatttgtaaaaataaaagataagaatgaaatattaaaaagaaacctggaaaacactcagaaccaaataaaagctgagtacatcagcctggcagagcacgaggcaaagatgagctcgctaagtcagagcatgagaaaggtgcaggatagtaatgctgaaatcttggccaactacagaaaaggccaagaagagattgtgacactgcatgccgaaattaaagcccagaagaaggagctcgacacaatacaagaatgcattaaggtaaaatacgccccaattgtcagctttgaggagtgcgagagaaaatttaaagcaacagagaaagaactaaaagaccagttatcagagcagacacaaaagtatagtgtcagtgaagaagaagtcaagaaaaacaagcaagagaatgacaagttaaagaaggagatttttacccttcagaaagatttgagagataagacagttctcattgagaagtctcatgaaatggaaagagcattaagcagaaaaacagacgagctaaacaaacagttaaaagacttgtcacagaaatacacggaagtaaagaatgtgaaagagaagctagtagaagaaaatgccaaacagacttctgagatacttgcagtgcaaaatcttttgcaaaaacaacatgttccattggaacaggttgaggctctgaaaaaatctcttaatggcacaattgaaaatctaaaggaagaactgaagagtatgcaaaggtgttacgagaaagagcagcagacagtgaccaaactgcatcaattgttggagaatcaaaagaactcttctgtacccctggcagagcatttgcagattaaagaagcatttgagaaagaagttggaatcataaaagccagcttgagagaaaaggaagaagaaagccaaaacaaaatggaagaagtctccaaacttcagtcggaggttcagaatactaaacaagcattaaaaaaattagagactagagaggtagttgacttgtctaaatataaagcaacaaaaagtgatttggagacacagatttctagcttaaatgaaaaattggccaatctgaatagaaagtatgaggaagtatgtgaggaagttttgcatgccaaaaagaaggaaatatctgcaaaagatgagaaggaattactgcatttcagcattgagcaagaaattaaggatcagaaggaacgatgtgataagtccttaacaacaatcacagagttacaaagaagaatacaagaatctgctaaacaaatagaagcaaaagataataagataactgaactgcttaatgatgtggaaagattaaaacaggcactcaatggcctttcccaactcacctacacaagtgggaaccccaccaagaggcagagccagctgattgacactctgcagcaccaagtgaaatctctggagcaacagctggccgatgctgacagacagcaccaagaagtaattgcaatttatcggacacaccttcttagtgctgcacagggtcacatggatgaagatgttcaggaggctctgctccagatcatacaaatgcggcaggggcttgtgtgctagccgttagcactgactgccagtatctgttttatcttgctggtgctgaacattctttgtgcaactccatggtctttctgggccttactgtgctggtataattaaaataaaatatattttgttctattggtaggtttttttttaaaattagatgaatatgttagtctttttcaatatcagtttgaatcttattttctgtatgtgttaattttacaaataggcaaacaacataactttgccctggattgactacatatttttaaaccttcaagtccctaataaaacatgagccatctgagtgagtccatatgaagcgaggttaggctgaaataattgcttaaagatgtctttcagagaaattaatttggttggtggccacttttaggtggatcaaaagacctttcagatcctcagaaccttgagacataatacagttgtgaggaatgtgttgtaacttggctggccaagttacatgttacagtatctttactgaggtaacttcattagtgtctttggccttttttgtaggtatagatattttttctttttacactaataacttttatgccttttaaaataaatttattttcataaatggtttgcagtgctaaattacatttagattaagaacaggcaggggtggaatatatcaggaatttataataaaattgccttaatctctacaacagtatcttaatttttacttgcggtgactattcttgccacaatattggagaataatgatagatgatatactagatttttcaaagtgtgaaaacctttagactttttttagcaattagtttgacattcgctactatagtaaccaagcactcattatatatgcatcctccaaatgtttcatgcttatttataggaaagttatattaatgagattaataatgtgaaatacagttttcctgcaaaattagcattagagaattgattttagataacagatttttaaagttttagagaaaagtacagtaatacagtaaactgaaagagtatatagatagcaataaaataacataagtggacatgtttatagtaaatactctgaagtaaacaaccgtttttattaactgcatctcattagggaaagtttatatgtcttgttattttttattaacattttatttaccattcagagtgaaaattactaatttgagtattaacaaataactgaataaatggatcattacagttaggttttctcaaattgcaaaatttgccttagcaattatctttgaacatcccgaaccagatttttaaatcccatttttgtttaatagggtaaaaataccatcaaaatgacttctcataccaaagaataagccatcatattttttcggtgttgaaacaacattgaaagtcagaattggatttgtttttaattctttatacggtttacataagcaatatctgtctctttaattattatgattaatgtcgtccttcagcatgagttctgtttcacaagttttgggccacctatttcaataaaaaataaaatataaattaaaaaagttgccgggggtggtggctcatgcctgtaatcccagcactttgggaggctgagggaggtagatcacctgaggtcagaagttcgagaccagccttaccaatatggtgaagccccatctctactaaaaatacaaaaattagccctgcatggtggcaggtgcctgtagtcccaggtactcgggaggctgagacaggagaatcgcttgaacctgggaggcggaggttgcagtgagccaagatctcgccactgcactccagcttgggcaatagcaagactccatctcaaaataaaataaaataaaacttagagcaaagtttaaaactgagtattcatattaagtgttttattttccatattagagatgggaagggaaccttatgtgtattttattttgttttcaaccatcaataaagttttctctagaatattgttttgaacatccttgtaaaagatttgcgagttaaactattttatttactgtctgtgagagcattgggagtaggaaacgatggactccaaagtacaagggagaatacccattttcattcagctatctggagtaaaatatcaagtacttccttcaactaatcttgtctcattcactcaccttttgatatcgaaggcagaaattgcgtttacaacactgaagaccaaagctttttaattagtaaacaagcggaacatagataatggacaatgctggccactgccattctgtgttcagaaagactatgagacctgaacatatggccaagaggaaagaagagtgacgttgtctaagatgtaatgagtgctctctgagagaatcactcaattcctattggagtgcaatccttacttgagaactttattactcttgttctgtgtagttttttttttttgtcacttccccatcagaaaagcatattctttttgatagagggtcagtgttataaataattgtcttttgaaataaaatcaaatattcatgcattg

SEQ ID NO: 236 - DNA, 1239 bp, Homo sapiens
agtctgagcccagagagccgcggggaccatggagccggtgccgctgcaggacttcgtgcgcgccttggaccccgcctccctcccgcgcgtgctgcgggtctgctcgggggtctacttcgagggctccatctatgagatctctgggaatgagtgctgcctctccacgggggacctgatcaaggtcacccaggtccgcctccagaaggtggtctgtgagaacccgaagaccagccagaccatggagctcgcccccaacttccaggtcttctcaagtcttaggattgcagcaacacgctcggctgcccaaacccaaggcgaagaccttgccagagttcatcaaggatggctccagtacgtacagcaagattcctgcccacaggaagggccacaggcccgctaagccccaaaggcaggatctagatgatgatgaacatgattatgaagaaatacttgagcaatttcagaaaaccatctaagtgctggaggaaccacgcttcctaactgctgcttctcagggaatccgacaccagccaaccattttaagcctctaaaagacctcgggcaagtctcacagaaactgagctgcagacggggagtagctttgtggaaactgatttgatggacactgcaccagcttccttcaggttctagattcttgctacttagggcgggctggtttggacctaacatctcgcacgtgactccctcagcctcagagccttgggatgcagagcagctggcagggttcctctcaatcctgcaaccccagctgtcccaccggtggatgcagaggggaatccgaggccatcaaccttggtgacagcagcgcagtgccaatgctgatcacactgcatgggagattttgttaacgtctgccacccccactctcacccccaagctctaagcccccgggaggcctggactgtcttcctcatctctgtagcaccaagcctgatagatctgtatatggtaaacaggggtttaaccacatgtggttaacatggattaatgtgggaacttggcttcaagaacacaaccttaggaccttgggccccaaaagctggtggtgaaatgaggaggagccaatttaagaagacccttatggagacctgaggctgcagaaactggtaggtttcatcaggtggttaaagtcgtcaaagttgtaagtgactaaccaagattatttcattttaaaaccatagaataaaaatgacacctgagcttctctatgaatgagaa

SEQ ID NO: 237 - DNA, 2337 bp, Homo sapiens
atggctcgcacagggtggaccagccccattcccctatgtgtttctctgctgctgacctgtggctttgctgaggcagggaagctgctggtagtgcccatggatgggagtcactggttcaccatgcagtcggtggtggagaaacttatcctcagggggcatgaggtggttgtagtcatgccagaggtgagttggcaactgggaaaatcactgaattgcacagtgaagacttactcaacctcatacactctggaggatctggaccgggaattcatggatttcgccgatgctcaatggaaagcacaagtacgaagtttgttttctctatttctgagttcatccaatggtttttttaacttatttttttcgcattgcaggagtttgtttaatgaccgaaaattagtagaatacttaaaggagagttcttttgatgcggtgtttcttgatccttttgatgcctgtggcttaattgttgccaaatatttctccctcccctctgtggtcttcgccaggggaatagcttgccactatcttgaagaaggtgcacagtgccctgctcctctttcctatgtccccagaattctcttagggttctcagatgccatgactttcaaggagagagtacggaaccacatcatgcacttggaggaacatttattttgccagtatttttccaaaaatgccctagaaatagcctctgaaattctccaaacacctgtcacagcatatgatctctacagccacacatcaatttggttgttgcgaacagactttgttttggactatcccaaacccgtgatgcccaatatgatcttcattggtggtatcaactgccatcagggaaagccattgcctatggaatttgaagcctacattaatgcttctggagaacatggaattgtggttttctctttgggatcaatggtctcagaaattccagagaagaaagctatggcaattgctgatgctttgggcaaaatccctcagacagtcctgtggcggtacactggaacccgaccatcgaatcttgcgaacaacacgatacttgttaagtggctaccccaaaacgatctgcttggtcacccgatgacccgtgcctttatcacccatgctggttcccatggtgtttatgaaagcatatgcaatggcgttcccatggtgatgatgcccttgtttggtgatcagatggacaatgcaaagcgcatggagactaagggagctggagtgaccctgaatgttctggaaatgacttctgaagatttagaaaatgctctaaaagcagtcatcaatgacaaaagttacaaggagaacatcatgcgcctctccagccttcacaaggaccgcccggtggagccgctggacctggccgtgttctgggtggagtttgtgatgaggcacaagggcgcgccacacctgcgccccgcagcccacgacctcacctggtaccagtaccattccttggacgtgattggtttcctcttggccgtcgtgctgacagtggccttcatcacctttaaatgttgtgcttatggctaccggaaatgcttggggaaaaaagggcgagttaagaaagcccacaaatccaagacccattgagaagtgggtgggaaataaggtaaaattttgaaccattccctagtcatttccaaacttgaaaacagaatcagtgttaaattcattttattcttattaaggaaatactttgcataaattaatcagccccagagtgctttaaaaaattctcttaaataaaaataatagactcgctagtcagtaaagatatttgaatatgtatcgtgccccctctggtgtctttgatcaggatgacatgtgccatttttcagaggacgtgcagacaggctggcattctagattacttttcttactctgaaacatggcctgtttgggagtgcgggattcaaaggtggtcccacggctgcccctactgcaaatggcagttttaatcttatcttttggcttctgcagatggttgcaattgatccttaaccaataatggtcagtcctcatctctgtcgtgcttcataggtgccaccttgtgtgtttaaagaagggaagctttgtacctttagagtgtaggtgaaatgaatgaatggcttggagtgcactgagaacagcatatgatttcttgctttggggaaaaagaatgatgctatgaaattggtgggtggtgtatttgagaagataatcattgcttatgtcaaatggagctgaatttgataaaaacccaaaatacagctatgaagtgctgggcaagtttactttttttctgatgtttcctacaactaaaaataaattaataaatttatataaattctattt

SEQ ID NO: 238 - DNA, 3646 bp, Homo sapiens
ccggagctggacgtgggcggcggcggggcctgaggtctggggctcgggcggtgggcgctgctgtggccggcgcgcgtgggccccggcgaggcggcactgcaggagctttgcgggcagctggagcgctacctgggcgcggcggcccacggctgtggctgcgccaccgtgcgcgacgctctcttcgcggctaacggccgcgcggccgactgcgagagcccgcgcgagtttcgggagcgggccctgcgcgcctgatgggtcgaggcggacgcgcggctgcgtcaggtaagcgaggccgggccgccggcgtttgaccgcgcttgggtggcctgggacccggtgggaggcttccccggcgccgagagccctggctgacggctgatggggaggagccggcgggcggagaaggccacgggctccccagtaccctcacctgcgcgggatcgctgcgggaaaccagcgggagcttcggcagggcctgcagagaggacaagcgaagttagagcctagtgtacttgccgctgggagctgggctaggcccccaacctttgccctgaagatgctggcagagcaggatgttgtaacgggaaatgccagaaatactgcaagcaaaactgaaaacaacccatccatgtaggaaagaataacacggactacacgttattcaaggacaccgaaaagccaacaccatggtagcattaatgaaagtttaccaagaggaagatgaagcctaccaggaattagttaccgtggcaaccacgttcttccagtacttactgcagccatttagggctatgcgagaagttgcaactttataagtccttggatgaggatgacctaggtcctagaagggtagttgccctggagaaagaagctgaagaatggaccagacgggctggagaagctgtcgtctctattcaagatatcacagtgaattattttaaggagacagtaaaagcattagcaggagtttctgatatattgcacagaatcaacaagatataaagcagaatgatgatcctggttttttggtcaaactatccatatgagcctgtctgtctagctagtcatagaaacaatatggaagcaagtgtgccaaaatataagaagcacttgcctcaactaggaatgcagaaagaaatggaacaggatgtgaagagatttggccaggctgcctgggccacagcaattcccaggttggaaaaacttaagctaatgctagctcaagagactctgcaactcatgagagcgaaagagttatgtttaaatcacaaaagagctgaaattcagggaaagatggaagatcttccagaacaagaaaaaaatataaatgttgtagatgaattagcaatacaattttatgaaattcagttagaactatatgaagttaaatttgagatattaaaaaacaaagaaatactgcttactacacagttggactctcttgaaagacttataaaagatgaaatttagaatcaagttcaaaacaaaaaactctttggaattttgattgtgattttgcttaaaattagagattactttggggagaatagtggtctttgcaattttgaatcttcctacccaagaacatgaaaaacaggatgaagttgtctattacgatccatgtgaaagtccagaggaacttagtcattgactgtggtggggctgcaggacgataagaattcggaagtgaaagaactcagaaggcagtgccagcagctggagtctattaaacggggcaggatctgtgtcaaaagagcttctctccagagtagaaaggatcagtgcgaagaaaatcattggctcagattgcaacaggctgaagaaagcataagatattctcgtcagcatcacagtattcagatgaaaagagacaagataaaaaggagcaaaagaaaaaagaatggatcaaccaagaacgtcaaacactccaacaattgagagcatttaaagatagaaataatgagagagattgtctgtcttgaagttctcagtgcctgtgcattgctgccactacacagctagtatcatgacagcagcttcagaaccagagctggcttccaggcaaggctgggtggggaagaaagagaaaaacaaaagaattatttctctatgccgagaccagctcggtcagggagaccctaacctagcggtgctagaggaattaaagacatagacacagaaatatagaggtgtgaagtgggaaatcaggggtctcacagccttcagagctcagccacgaacagagatttacccacgtatttattaacagcaagccagtcattagcattgtttctatagatattaaattaactaaacgtatcccttatgggaaacgaagggaggggccgaattaaaggaataggttgggctagttaactgcagcaggagcatgtccttaaggcacagatcgctcatgctattgtttgtggcttaagaatgcctttaagcggttttccaccccgggcaggccaggtgttccttgccctcattccagtaaacccacaaccttccagcatgggtgttagggccattatgaacatgttacagtgctgcagagattttatttatggccagtttatggccagattttggggggcctgctcccaacactctacatatgctccatcttgcagaggcttcattcttggttctctagctaaaaacagtagaaattttgcacacctgggttagaaaaaaaaatagccattaaacccacccctgttacaggtcactattggtattttgattttgccttcaatccatctgttattgtttacttttaagagtccttgatagttgctttttatgtccagagttttaatttcagtcagaaagagaaataggccttggtgagcatgctttgtcttggctggtgccagaagtctgtactcaaatatttttaaaataatttttagttgaataacaagttagacctgtgtttagctttctcattgttttcctaaaaatagaagaaaaggttttaaatactttaaccacgaaatactttaaagcaggtttaaaataaactccttcattttgcctgttctattactctgttctcacactgctaataaagacatacccaagactggtaatttataaagtaaagaggtttaattgactcacagttccacatggctggggaggcctcccaatcatggcagaaggtgaatgaggagcaaagtcacatctttgtggcaggcaagagagagagcatgtgtgcaggggaattcccctttataaaaccgtccaatctcatgagacttatgcactctcatgggagcagcatgagaaagactcacctccgtgattcagttacctcccactgtgtccctgccacaacatgtgggaattgtgggagctaaaaatcaagatgagatttgggtaggaacacagtcaaaccatatctcctgtatacattcacactagcattttagttttagaactagttctatgttactatctgaattaatttttccacaattttgtaaggaaaaataatgcgttctttgaatttcatgtgtaaatgatatttttagttttgtgtcattttgtccaataaattctgaaaatctttgtattgacagtgtgttatctctgcataaccatatatgtataagagcgctcaataaaaagaataaagagg

SEQ ID NO: 239 - DNA, 2221 bp, Homo sapiens
ggccgggccgccggcgtttgaccgcgcttgggtggcctgggaccctgtgggaggcttccccggcgccgagagccctggctgacggctgatggggaggagccggcgggcggagaaggccacgggctccccagtaccctcacctgcgcgggatcgctgcgggaaaccagggggagcttcggcagggcctgcagagaggacaagcgaagttaagagcctagtgtacttgccgctgggagctgggctaggcccccaacctttgccctgaagatgctggcagagcaggatgttgtaacgggaaatgtcagaaatactgcaagcaaactgaaaacaacccatccatgtaggttattcaaggacacggaaaagccaacaccatggtagcattaatgaaagtttaccaagaggaagatgaagcctaccaggaattagttaccgtggcaaccacgttcttccagtacttattgcggccatttagggctatgcgagaagttgcaactttataagtccttggatgaggatgacctaggtcctagaagggtagttgccctggagaaagaagctgaagaatggaccagacgggctggagaagctgtcgtctctattcaagatatcacagtgaattattttaaggagacagtaaaagcattagcaggagtttctgatatattgcacagaatcaacaagatataaagcagaatgatgatcctggttttttggtcaaactatccatatgagcctgtctgtctagctagtcatagaaacaatatggaagcaagtgtgccaaaatataagaagcagttgcctcaactaggaatgcaaaaagaaatggaacaggatgtgaagagacttggccaggctgcctgggccacagcaattcccaggttggaaaaacttaagctaatgctagctcaagagactctgcaactcatgagagcgaaagaattgtatttaaattgcaaaagagctgaaattcagggaaagatggaagatcttccagaacaagaaaaaaatataaatgttgtagatgaattagaaatacaattttatgaaattcagttagaactatatgaagttaaatttgagatattaaaaaacaaagaaatactgcttactacacagttggactctcttgaaagacttataaaagttaaaccttagattgacttgggtctgtttctgagttgttctcctccattggttcgtgagtggcttctgctgctggctccatactgttcccacgactgtcttggaggcacattttagggtctgaaaaacaggatgaagttgtctattacgatccatgtgaaagtccagaggaacttagtcattgactgtggtggggctgcaggacgataagaattcggaagtgaaagaactcagaaggcagtgccagcagctggagtctattaaacggggcaggatctgtgtcaaaagagcttctctccagagtaggaaggatcagtgcaaagaaaatcattggctcagattgcaacaggctgaagaaagcataagatattctcgtcagcatcacagtattcagatgaaaagagacaagataaaaaggagcaaaagaaaaaagaatgggtcaaccaagaacgtcaaacactccaacgattgagagcatttaaagatagaaataatgagagagattgtctctcttgaagttctcagtgcctgtgcattgctgccactacacagctagtatcatgacagcagcttcagaaccagagctggcttccaggttgtgtgtgtgagccagattttattgcaagtgtttgaaagactattgcaaatatcggatattgccagacagttggtaaaaagcaaattgagtctattgagaaattaattcaccagctgaaggaagcacatttgccttacagtcatcagatattctacccaccagactcatctccgagatagcatcctaatgagcttcctaaaccaactaaacatgagcaggaagcatcagtcgtcaaaactgactcttttcagccaatcagctgactgcacaaactgtatggcattgaggaaaggaagaacattctgaaagtttttttttttcattctgccctcactttgttggtttctcagttttacagatgcagtgtcatgcgcagaaccctgtaaatgagcatagttcattcaagtatataaagtgctttcgtgtattattattcagtggaataaaatgaatgttaacaggaaaaaaaaaaaaaaa

SEQ ID NO: 240 - DNA, 2311 bp, Homo sapiens
caaaagggaactttatatggaaaagcttcaagaacatttaatcaaagcaaaagcctttaccataaagaagacgctggagatctatgtgcccatcaaacagttcttttacaacctcatccacccggagtatagcgccgtgactgacgtgtatgtactcatgttcctggctgacactgtggacttcatcatcattgtcttcggcttttgggcctttgggaaacactcagcagctgcagacatcacctcttcactgtcagaggaccaggtcccggggccgtttttggtgatggtcctcattcagtttggaaccatggtggtggaccgagccctctacctcaggaagactgtactgggaaaggtcatcttccaggtcattcttgtgttcggaattcacttctggatgttcttcatcttacctggtgtgactgagaggaaattcagccagaacctggttgcccagctttggtactttgtgaaatgtgtttacttcgggttgtctgcttaccagatccgttgtggctacccaacgcgagtcctggggaacttcctcaccaagagctacaattacgtcaacctcttcttattccaagggtttcgcctcgtgccctttttgactgagctgagggcagtgatggactgggtgtggacggacacaactttgagcctgtccagctggatctgtgtggaggacatctatgctcacatattcatcctgaagtgttggcgggagtcggagaagcctattttcacaatgagtgcccaacaaagccagttgaaagttatggaccagcagagctttaacaaatttatacaagctttttctagggacaccggtgctatgcaatttctggaaaattatgaaaaagaagacataacagtagcagaactggaaggaaactcaaattctttgtggaccatcagcccacccagtaagcagaaaatgatacacgaactcctggaccccaatagtagcttctctgttgttttttcatggagtattcagagaaacttaagtctgggtgcaaaatcggaaatagcaacagataagctttcttttcctcttaaaaatattactcgaaagaatatcgctaaaatgatagcaggcaacagcacagaaagttcaaaaacaccagtgaccatagaaaagatttatccatattatgtgaaagcacctagtgattctaactcaaaacctataaagcaacttttatctgaaaataatttcatggatattaccatcattttgtccagagacaatacaactaaatataacagtgagtggtgggttctcaacctgactggaaacagaatatacaatccgaactctcaggccctggaactggtggtcttcaatgacaaagtcagtcccccaagtctggggttcctggctggctatggtattatgggattatatgcttcagttgtccttgtgattgggaaatttgtccgtgaattcttcagtgggatttctcactccatcatgtttgaagagcttccaaatgtggatcgaattttgaagttgtgcacagatatttttttagttcgagagacaggagaactggagctagaagaagatctctatgccaaattaatattcctatatcgctcaccagagacaatgatcaaatggactagagaaaaaacaaattgaaaccttagaacacagactgcaaataatgttaacatttgaattttttttaaaagcacaatattctcataagagctaagcatttctagttcgacggaaatggtttgtttctcttctgataggtagacaaaaggagctgatatccttctgcagtaaaagctaccttgcaagttaaggcactgttgaaaatgttatttgtaactccatttctctgaaatcagggctacttgctttatgttttagtcaacagtgtctcgcattctgattgatcatgtgaaggaatcatttatgggccccgtccctaagagaaacagaagaggagtcagaaagaaagatgcctgtgttttcctctgtggggcccgtgcacttcctggagagatgctacaatgcaatatacagcgctccatccccactggggaagctgctgtgatgagactagatgagccttcaacacactcagaaaatgcaacagcaatagggggcagacagctcctacctgtgtttctaggagcaaaagagagggaactaattgcccgtgaagacgccagtggaaggatcagcctcattctaagcaaaaacatagtattagtgatactcttactgccttatcttaaccaaggactaataggatacctttccattaaacaccagtgacttctcagg

SEQ ID NO: 241 - DNA, 6277 bp, Homo sapiens
tttcaaattctcttttattgctttatgtccctgactcatgcaggccaaagggtgaggaggagtaatagccaacaagagcgtcctgcagaaagaaacaggctgcgtgggtccggaggagcttgaaaggaagaacccgaccaaagggcaggagacccggctctccaggtcgcggaggcgtgggtgcccagccaggcggagtgcggggcggggcctctcgggccgcaaggtggggcctcctgggccgggaggtgggaggtgagctccgccagcccagcccactgcagacaggttacccaggacctcaaggtgtgctgcgtcaccccgcccgcgctgcgctgattggttcctccagggagcccccgccccctcagctgtaaccgggccggcttcagtgtcgccgccatctttgttgatgtgtcagctccgcaggggtttggggaaacggccgctgagtgaggcgtcggctgtgtttctcaccgcggtcttttcctcccactcttggctggttggaccccgctatggaaaagttggcccctgagccagagctccagcagccttgttagggcgtggcctgaggcttggataagtgggatgtaaaacgaagatcaggagcagatttgaagaattacaaagtgaattggtgccagtcagcatgtcagagacagaccacatagcctctacttcctctgataaaaatgttgggaaaacacctgaattaaaggaagactcatgcaacttgttttctggcaatgaaagcagcaaattagaaaatgagtccaaactattgtcattaaacactgataaaactttatgtcaacctaatgagcataataatcgaattgaagcccaggaaaattatattccagatcatggtggaggtgaggattcttgtgccaaaacagacacaggctcagaaaattctgaacaaatagctaattttcctagtggaaattttgctaaacatatttcaaaaacaaatgaaacagaacagaaagtaacacaaatattggtggaattaaggtcatctacatttccagaatcagctaatgaaaagacttattcagaaagcccctatgatacagactgcaccaagaaatttatttcaaaaataaagagcgtttcagcatcagaggatttgttggaagaaatagaatctgagctcttatctacggagtttgcagaacatcgagtaccaaatggaatgaataagggagaacatgcattagttctgtttgaaaagtgtgtgcaagataaatatttgcagcaggaacatatcataaaaaagttaattaaagaaaataagaagcatcaggagctcttcgtagacatttgttcagaaaaagacaatttaagagaagaactaaagaaaagaacagaaactgagaagcagcatatgaacacaattaaacagttagaatcaagaatagaagaacttaataaagaagttaaagcttccagagatcaactaatagctcaagacgttacagctaaaaatgcagttcagcagttacacaaagagatggcccaacggatggaacaggccaacaagaaatgtgaagaggcacgccaagaaaaagaagcaatggtaatgaaatatgtaagaggtgagaaggaatctttagatcttcgaaaggaaaaagagacacttgagaaaaaacttagagatgcaaataaggaacttgagaaaaacactaacaaaattaagcagctttctcaggagaaaggacggttgcaccagctgtatgaaactaaggaaggcgaaacgactagactcatcagagaaatagacaaattaaaggaagacattaactctcacgtcatcaaagtaaagtgggcacaaaacaaattaaaagctgaaatggattcacacaaggaaaccaaagataaactcaaagaaacaacaacaaaattaacacaagcaaaggaagaagcagatcagatacgaaaaaactgtcaggatatgataaaaacatatcaggagtcagaagaaattaaatcaaatgagcttgatgcaaagcttagagtcacaaaaggagaacttgaaaaacaaatgcaagaaaaatctgaccagctagagatgcatcatgccaaaataaaggaactagaagatctgaagagaacatttaaggagggtatggatgagttaagaacactgagaacaaaggtgaaatgtctagaagatgaacgattaagaacagaagatgaattatcaaaatataaggaaattattaatcgccaaaaagctgaaattcagaatttattggacaaggtgaaaactgcagatcagctacaggagcagcttcaaagaggtaagcaagaaattgaaaatttgaaagaagaagtggaaagtcttaattctttgattaatgacctacaaaaagacatcgaaggcagtaggaaaagagaatctgagctgctgctgtttacagaaaggctcactagtaagaatgcacagcttcagtctgaatccaattctttgcagtcacaatttgataaagtttcctgtagtgaaagtcagttacaaagccagtgtgaacaaatgaaacagacaaatattaatttggaaagtaggttgttgaaagaggaagaactgcgaaaagaggaagtccaaactctgcaagctgaactcgcttgtagacaaacagaagttaaagcattgagtacccaggtagaagaattaaaagatgagttagtaactcagagacgtaaacatgcctctagtatcaaggatctcaccaaacaacttcagcaagcacgaagaaaattagatcaggttgagagtggaagctatgacaaagaagtcagcagcatgggaagtcgttctagttcatcagggtccctgaatgctcgaagcagtgcagaagatcgatctccagaaaatactgggtcctcagtagctgtggataactttccacaagtagataaggccatgttgattgagagaatagttaggctgcaaaaagcacatgcccggaaaaatgaaaagatagaatttatggaggaccacatcaaacaactggtggaagaaattaggaaaaaaacaaaaataattcaaagttatattttacgagaagaatcaggcacactttcttcagaggcatctgattttaacaaagttcatttaagtagacggggtggcatcatggcatctttatatacatcccatccagctgacaatggattaacattggagctctctttggaaatcaaccgaaaattacaggctgttttggaggatacgttactaaaaaatattactttgaaggaaaatctacaaacacttggaacagaaatagaacgtcttattaaacaccagcatgaactagaacagaggacaaagaaaacctaaaacaagcctcttgctcagtaaagagacaaaagccacacaggagtaggtgccactgacctctattgttggagactttgttccactttttgtttcagccagtaaaaatattgttttgcttcatctgtacacaaaaaaatacccttttacaatatgaatgcattgctgtatatactgtaagactgaaagctttgatgaaatttgtttttgtatggtgcaatatgacagcctgtcattgaatctaaacaacttaatttgcttgtattcataagaagtgttgaacattacaagggcttttataaaaaaccctttgttcatatttcttccctttaaaatatgtaatgtcaaaaatgactcaccttttaaaaattatgcatgaaaacaggtggtaaacattcagtaatacgctatttctccaacatcaagacaactaaaacaaatgataaaaatgtttatttttacactccagcatatcgggtgagttttagggatgtgtatgaatatttaaatcttttaatttcagttttaatgaaagctgaacttaataggaaagctagctcttggtaactagcaatgatcaggcattgtttgcctctgtcaggttttcttatctgttttaggtacattttttcagattctgattgtttgagttaatggttgaatttttaaagtttttagttacttaaaatatgattttaaattacatattaatttagaaaattcctgtgtttacttatattttaaattgtgaaatggatccaatcattagaacagagagaatagttctttgaaactgaaatactttagttttactgaccttgtgtaaagataatatgaagaaccagcttccaaaagaaaccagcatatggcactataaactatttcatttgagcaccattctttaccatggatatattaattatgtattatagtggagtgatcatacagttcccccaaatgtgatgtttcagtgtatttatttaaaacataaagtagaccaggtgcagtagctcacgcctgtaatcccagcactttgggaagccaaggcaggaggattacctgaggccaggagtttaagaccagccttggcaacatagcgagacccccatctctacaaagaaattttaaaagattatccaggcatggtggtgcatgcctatggttccagctactcgggaggctgaagcggtagaatcacttgagcacaggaggtcaaggctgcaggtgagccatgatcgtgtcactgcactccagcctaggcaacagagcaagaccctgtctcttaaaacaaaaaacctcacacatacctaaaataagtatatatctgtaaccaaaggaacttaattttagagccaaatttttctatcttgttggattttttacagtgtttaagatagacacttaagtgttgccgtagtatcaatatttctgtcattgaattttttctcaccccttattatttctcacttacaatttctgagcatgatttttcataattcattatcttcagatcattactataataagataccgtggctcttatgcagatattgcagcaagccttgtttggtttggatttttgcatccctttttctcccattaagggaattaagttttgggatgatggattaaaagcctgtaaagaattgtttgggctctaaaagttgggctcatggtggcaatatccttttaatgtgttttaacattttttaatcaacatcgtttaaaaataatttactaaggattagattatttaatgaatgtctttttttctatatattgaattagatgttatcccaaaaaaaatatcttttcacttcaaaatgaaaatatatgttcaaagatgttttatttttagaatagttataaaaagtattagtcttaacataatgtgtcttgttctttttaccaataataatttatcaaaataagagggaaagtgcaatcaaatctgaattattttactatttgtttctagacacactacttaacactcctaaagactactttgagtaggcaacataactaaatttttctagtttcttatgatacaggttcataaactacaatatttggatttttttccccaaggcacaaaatgtataatggagaccaaatagtgatctgatccatagtatcctatgcctatacactttaaaatgtatatacattttagacaaaaatgcacactccagtattaatatttgtgctaccatctacttggagaagtttaatgagaaaattttagaagaaaagtattacaaacaatattttgactctattacctgttttgccttatacattttagaaactggaaattttttaaagaaaatgctttagttttcttctgttcttcactgtctacagtgtgcttttgtatatggatcaggactgagcaaagtaattacatgtatcagagatacttatctctatactaattcacagacagctcctgatgtaaggatttagagggccttctgccctctgaatatatggtgaggagaatggggtatctggaaaaggaaaatgatctggataaatctgagacctggggggaagtttgttttatatgttcattattggttgttacatatcaaggctgttttggttatgtatcaatattgtggtttatttgagctggaagtgattttttctgtgtatgtatatgtatacacttcaataggttttaattttgaagtgaatatttgccatgactccattttccccataccacttcagactttagcctgtttagttttaaggactgaaaatggtaggtttgggcagaagaatgaatttgaactttgatggggtttttttgtttttactttctatcttcataaccatttaaagcgatttagcttgaaattaaattttatcaggctaccaacatgttatttatttatttaataaacacatttattgaaaacc

SEQ ID NO: 242 - DNA, 1032 bp, Homo sapiens
gcacttggcttcaaagctggctcttggaaattgagcggagagcgacgcggttgttgtagctgccgctgcggccgccgcggaataataagccgggatctaccatacccattgactaactatggaagattataccaaaatagagaaaattggagaaggtacctatggagttgtgtataagggtagacacaaaactacaggtcaagtggtagccatgaaaaaaatcagactagaaagtgaagaggaaggggttcctagtactgcaattcgggaaatttctctattaaaggaacttcgtcatccaaatatagtcagtcttcaggatgtgcttatgcaggattccaggttatatctcatctttgagtttctttccatggatctgaagaaatacttggattctatccctcctggtcagtacatggattcttcacttgttaaggtagtaacactctggtacagatctccagaagtattgctggggtcagctcgttactcaactccagttgacatttggagtataggcaccatatttgctgaactagcaactaagaaaccacttttccatggggattcagaaattgatcaactcttcaggattttcagagctttgggcactcccaataatgaagtgtggccagaagtggaatctttacaggactataagaatacatttcccaaatggaaaccaggaagcctagcatcccatgtcaaaaacttggatgaaaatggcttggatttgctctcgaaaatgttaatctatgatccagccaaacgaatttctggcaaaatggcactgaatcatccatattttaatgatttggacaatcagattaagaagatgtagctttctgacaaaaagtttccatatgttatatcaacagatagttgtgtttttattgttaactcttgtctatttttgtcttatatatatttctttgttatcaaacttcagctgtacttcgtcttctaatttcaaaaatataacttaaaaatgtaaatattctatatgaatttaaatataattctgtaaatgtg

SEQ ID NO: 243 - DNA, 6859 bp, Homo sapiens
ggtggcctctgtggccgtccaggctagcggcggcccgcaggcggcggggagaaagactctctcacctggtcttgcggctgtggccaccgccggccaggggtgtggagggcgtgctgccggagacgtccgccgggctctgcagttccgccgggggtcgggcagctatggagccgcggcccacggcgccctcctccggcgccccgggactggccggggtcggggagacgccgtcagccgctgcgctggccgcagccagggtggaactgcccggcacggctgtgccctcggtgccggaggatgctgcgcccgcgagccgggacggcggcggggtccgcgatgagggccccgcggcggccggggacgggctgggcagacccttggggcccaccccgagccagagccgtttccaggtggacctggtttccgagaacgccgggcgggccgctgctgcggcggcggcggcggcggcggcagcggcggcggctggtgctggggcgggggccaagcagacccccgcggacggggaagccagcggcgagagcgagccggctaaaggcagcgaggaagccaagggccgcttccgcgtgaacttcgtggacccagctgcctcctcgtcggctgaagacagcctgtcagatgctgccggggtcggagtcgacgggcccaacgtgagcttccagaacggcggggacacggtgctgagcgagggcagcagcctgcactccggcggcggcggcggcagtgggcaccaccagcactactattatgatacccacaccaacacctactacctgcgcaccttcggccacaacaccatggacgctgtgcccaggatcgatcactaccggcacacagccgcgcagctgggcgagaagctgctccggcctagcctggcggagctccacgacgagctggaaaaggaaccttttgaggatggctttgcaaatggggaagaaagtactccaaccagagatgctgtggtcacgtatactgcagaaagtaaaggagtcgtgaagtttggctggatcaagggtgtattagtacgttgtatgttaaacatttggggtgtgatgcttttcattagattgtcatggattgtgggtcaagctggaataggtctatcagtccttgtaataatgatggccactgttgtgacaactatcacaggattgtctacttcagcaatagcaactaatggatttgtaagaggaggaggagcatattatttaatatctagaagtctagggccagaatttggtggtgcaattggtctaatcttcgcctttgccaacgctgttgcagttgctatgtatgtggttggatttgcagaaaccgtggtggagttgcttaaggaacattccatacttatgatagatgaaatcaatgatatccgaattattggagccattacagtcgtgattcttttaggtatctcagtagctggaatggagtgggaagcaaaagctcagattgttcttttggtgatcctacttcttgctattggtgatttcgtcataggaacatttatcccactggagagcaagaagccaaaagggttttttggttataaatctgaaatatttaatgagaactttgggcccgattttcgagaggaagagactttcttttctgtatttgccatcttttttcctgctgcaactggtattctggctggagcaaatatctcaggtgatcttgcagatcctcagtcagccatacccaaaggaacactcctagccattttaattactacattggtttacgtaggaattgcagtatctgtaggttcttgtgttgttcgagatgccactggaaacgttaatgacactatcgtaacagagctaacaaactgtacttctgcagcctgcaaattaaactttgatttttcatcttgtgaaagcagtccttgttcctatggcctaatgaacaacttccaggtaatgagtatggtgtcaggatttacaccactaatttctgcaggtatattttcagccactctttcttcagcattagcatccctagtgagtgctcccaaaatatttcaggctctatgtaaggacaacatctacccagctttccagatgtttgctaaaggttatgggaaaaataatgaacctcttcgtggctacatcttaacattcttaattgcacttggattcatcttaattgctgaactgaatgttattgcaccaattatctcaaacttcttccttgcatcatatgcattgatcaatttttcagtattccatgcatcacttgcaaaatctccaggatggcgtcctgcattcaaatactacaacatgtggatatcacttcttggagcaattctttgttgcatagtaatgttcgtcattaactggtgggctgcattgctaacatatgtgatagtccttgggctgtatatttatgttacctacaaaaaaccagatgtgaattggggatcctctacacaagccctgacttacctgaatgcactgcagcattcaattcgtctttctggagtggaagaccacgtgaaaaactttaggccacagtgtcttgttatgacaggtgctccaaactcacgtccagctttacttcatcttgttcatgatttcacaaaaaatgttggtttgatgatctgtggccatgtacatatgggtcctcgaagacaagccatgaaagagatgtccatcgatcaagccaaatatcagcgatggcttattaagaacaaaatgaaggcattttatgctccagtacatgcagatgacttgagagaaggtgcacagtatttgatgcaggctgctggtcttggtcgtatgaagccaaacacacttgtccttggatttaagaaagattggttgcaagcagatatgagggatgtggatatgtatataaacttatttcatgatgcttttgacatacaatatggagtagtggttattcgcctaaaagaaggtctggatatatctcatcttcaaggacaagaagaattattgtcatcacaagagaaatctcctggcaccaaggatgtggtagtaagtgtggaatatagtaaaaagtccgatttagatacttccaaaccactcagtgaaaaaccaattacacacaaagttgaggaagaggatggcaagactgcaactcaaccactgttgaaaaaagaatccaaaggccctattgtgcctttaaatgtagctgaccaaaagcttcttgaagctagtacacagtttcagaaaaaacaaggaaagaatactattgatgtctggtggctttttgatgatggaggtttgaccttattgataccttaccttctgacgaccaagaaaaaatggaaagactgtaagatcagagtattcattggtggaaagataaacagaatagaccatgaccggagagcgatggctactttgcttagcaagttccggatagacttttctgatatcatggttctaggagatatcaataccaaaccaaagaaagaaaatattatagcttttgaggaaatcattgagccatacagacttcatgaagatgataaagagcaagatattgcagataaaatgaaagaagatgaaccatggcgaataacagataatgagcttgaactttataagaccaagacataccggcagatcaggttaaatgagttattaaaggaacattcaagcacagctaatattattgtcatgagtctcccagttgcacgaaaaggtgctgtgtctagtgctctctacatggcatggttagaagctctatctaaggacctaccaccaatcctcctagttcgtgggaatcatcagagtgtccttaccttctattcataaatgttctatacagtggacagccctccagaatggtacttcagtgcctagtgtagtaactgaaatcttcaatgacacattaacatcacaatggcgaatggtgacttttctttcacgatttcattaatttgaaagcacacaggaaagttgctccattgataacgtgtatggagacttcggttttagtcaattccatatctcaatcttaatggtgattcttctctgttgaactgaagtttgtgagagtagttttcctttgctacttgaatagcaataaaagcgtgttaactttttgattgatgaaagaagtacaaaaagcctttagccttgaggtgccttctgaaattaaccaaatttcatccatatatcctcttttataaacttatagaatgtcaaactttgccttcaactgtttttatttctagtctcttccactttaaaacaaaatgaacactgcttgtcttcttccattgaccatttagtgttgagtactgtatgtgttttgttaattctataaaggtatctgttagatattaaaggtgagaattagggcaggttaatcaaaaatggggaaggggaaatggtaaccaaaaagtaaccccatggtaaggtttatatgagtatatgtgaatatagagctaggaaaaaaagcccccccaaatacctttttaacccctctgattggctattattactatatttattattatttattgaaaccttagggaagattgaagattcatcccatacttctatataccatgcttaaaaatcacgtcattctttaaacaaaaatactcaagatcatttatatttatttggagagaaaactgtcctaatttagaatttccctcaaatctgagggacttttaagaaatgctaacagatttttctggaggaaatttagacaaaacaatgtcatttagtagaatatttcagtatttaagtggaatttcagtatactgtactatcctttataagtcattaaaataatgtttcatcaaatggttaaatggaccactggtttcttagagaaatgtttttaggcttaattcattcaattgtcaagtacacttagtcttaatacactcaggtttgaacagattattctgaatattaaaatttaatccattcttaatattttaaaacttttgttaagaaaaactgccagtttgtgcttttgaaatgtctgttttgacatcatagtctagtaaaattttgacagtgcatatgtactgttactaaaagctttatatgaaattattaatgtgaagtttttcatttataattcaaggaaggatttcctgaaaacatttcaagggatttatgtctacatatttgtgtgtgtgtgtgtatatatatgtaatatgcatacacagatgcatatgtgtatatataatgaaatttatgttgctggtattttgcattttaaagtgatcaagattcattaggcaaactttggtttaagtaaacatatgttcaaaatcagattaacagatacaggtttcatagagaacaaaggtgatcatttgaagggcatgctgtaatttcacacaattttccagttcaaaaatggagaatacttcgcctaaaatactgttaagtgggttaattgatacaagtttctgtggtggaaaatttatgcaggttttcacgaatccttttttttttttttttttttttttgagacggagtcttgctctgttgccacgctggaatgcagtaacgtgatcttggctcactgcgacctccacctccccagttcaagcgattctcctgcctcagcctccctagtagctgggactacgggtgcacgccaccatgcccagctaatttttgtattttgagtagagacagggtttcaccgtgttggctaggatggtgtctatctcttgaccttgtgatccacccgcctcagcctcccagagtgctgggattacaggtgcgagccactgcgcctggctggttttcatgaatcttgatagacatctataacgttattattttcagtggtgtgcagcatttttgcttcatgagtatgacctaggtatagagatctgataacttgaattcagaatattaagaaaatgaagtaactgattttctaaaaaaaaaaaaaaaaaaaatttctacattataactcacagcattgttccattgcaggttttgcaatgtttgggggtaaagacagtagaaatattattcagtaaacaataatgtgtgaacttttaagatggataatagggcatggactgagtgctgctatcttgaaatgtgcacaggtacacttaccttttttttttttttttttaagtttttcccattcaggaaaacaacattgtgatctgtactacaggaaccaaatgtcatgcgtcatacatgtgggtataaagtacataaaatatatctaactattcataatgtggggtgggtaatactgtctgtgaaataatgtaagaagcttttcacttaaaaaaaatgcattactttcacttaacactagacaccaggtcgaaaattttcaaggttatagtacttatttcaacaattcttagagatgctagctagtgttgaagctaaaaatagctttatttatgctgaattgtgatttttttatgccaaattttttttagttctaatcattgatgatagcttggaaataaataattatgccatggcatttgacagttcattattcctataagaattaaattgagtttagagagaatggtggtgttgagctgattattaacagttactgaaatcaaatatttatttgttacattattccatttgtattttaggtttccttttacattctttttatatgcattctgacattacatattttttaagactatggaaataatttaaagatttaagctctggtggatgattatctgctaagtaagtctgaaaatgtaatattttgataatactgtaatatacctgtcacacaaatgcttttctaatgttttaaccttgagtattgcagttgctgctttgtacagaggttactgcaataaaggaagtggattcattaaacctatttaatgtcc

SEQ ID NO: 244 - DNA, 3897 bp, Homo sapiens
ggcagcctaggccgggcgagggccatgctgagcctcgcagccaagctggtggccttcttctggaggacggcggacacccctagggaggaagccgggcagctggagcccgagctcgcggaaggtgacactaagctgaaaactgtacggggtgtcgtgacaaggtactgcagcgattatggcatgattgatgatatgatctacttctccagtgatgctgtgactagcagagtgcttctgaatgttggacaggaagtgattgcagttgtggaagaaaataaagtgtccaatggactgaaagcaatcagggtagaagctgtctctgataagtgggaagacgacagcagaaaccatgggagtccctcagactgcggcccccgagtgttgattggctgtgtgacttccctggtggagggcgcaggctgtatcagtcagaccacctacttctctctggagagtgtgtgcgaaggcttcgagccctgcaagggagactgggtggaggctgagtaccggatccggcctggcacgtggagcagcgaagccacctcagtgaagccactgagatacaagcgcgtggacaaggtctgcatctctagcctctgtggaaggaacggggtgttagaggaaagcatcttctttaccttggactccttgaaactgccagatgggtacacaccccggagaggtgacgtggtcaatgcagtggtggtggagagcagccagtcatgctatgtctggagggcactttgtatgaccctagtgaagaggcgagacgccgcccctgttcatgaggccactcatttctatggaacgattttgctgaagaacaaaggtgatattgaagttacacaggtgacgcattttggaaccctaaaggaaggaagaagtaaaaccatggtgatctggatagagaataaaggagacattcctcaaaacttagtcagctgtaaactggctggctgggataaatctaaacaattcagattccaaatgctggataaagaccagatgtgccccgtggtatcttttgtttctgttcctgagaaggagaattcatcagatgaaaatattaattcattaaatagccacacaaaaaacaaaacctctcagatgtcggagagcagtttggtgaacaacagaggaatctctccaggtgattgtacctgtaaaggagaaaatggagaaaaagacaacattctatcaaggaagcagatgacagagcctgagcctggggggcttgtccctccagggggaaaaaccttcattgtggtcatctgtgacggaaaaaatcctggccgctgcaaggagctccttttgctctgtttttccgatttcctaattgggcgataccttgaagtaaatgttatcagtggggaggagtcactaattgctgcgcgcgaaccattttcttggaaaaagcttaaaagttcacaagcgttaacatccgcaaaaactacagttgttgtgaccgcacagaaaaggaactcaagacgacaacttccaagttttcttccccaatatccaatcccagatagacttagaaaatgtgtggaacaaaaaattgacatcctgactttccagccattacttgcagagcttctgaacatgtcaaattacaaggagaagttttcgactttgctgtggcttgaggagatttatgcagaaatggaactgaaagagtataacatgagcgggatcatcttaagaaggaatggggatctgctggttctggaggtcccagggttggccgaagggaggccttctctctacgcaggtgataaactgattttaaaaactcaagagtacaatggacatgccatcgaatacatcagctacgtgactgagattcatgaagaagatgtaactcttaaaattaatccagaatttgaacaagcctataactttgaacctatggatgtggaatttacatataataggaccacaagcagacggtgtcactttgcacttgaacacgtcatccacttaggtgtaaaagtgttgtttccagaagaaattattttacagtctccacaagtgacgggaaattggaaccatgcacaagacaccaaaagcagtggacagtccaccagcaaaaagaataggaaaacaatgacggaccaagctgagcatggaacagaggagaggcgtgttggtgacaaggacctgccggtgctggcaccctttactgcagagatgagcgattgggtagatgaaattcagacccctaaagcaagaaagatggagtttttcaacccagtgctaaatgaaaatcagaagttagcagttaaaaggattctgagtggtgactgccgtcccctcccgtatattctctttggacctcctggtactggaaagacagtgacaataatagaggctgttttacaggtacactttgccttgccggacagtcggattttagtctgtgcgccctccaacagtgctgctgacctcgtgtgtctgcggctgcacgagagcaaggtgctacagccggccaccatggtccgggtgaacgccacctgcaggttcgaggagatagttattgacgccgtcaaaccgtattgcagagacggagaagacatctggaaagcctcacgcttccggataatcatcaccacatgcagcagctcagggctgttttaccaaataggagtgagagttgggcacttcactcacgtgtttgtggacgaggctgggcaggcaagtgagccggaatgcctcattcctctggggctgatgtcggacatcagtggccagatcgtgctggcaggagaccccatgcagctcggcccagtcattaagtccagactcgccatggcctatgggctgaacgtgtcctttttggaacggctgatgtctcgacccgcgtaccagagggacgaaaatgctttcggtgcttgtggcgcacataatcccctgttggtcacaaagctggtgaagaactaccggtcccacgaggccctgctgatgctgccctcacggctgttctaccacagggaactcgaggtctgtgcggaccccacagtggtgacctccttgctgggctgggagaagttgcctaagaaaggcttccctctcatcttccatggtgtgcggggcagcgaggcacgggagggaaaaagcccatcgtggttcaacccggccgaggccgtccaggtcctgcgctactgctgcctcctggcccacagcatctccagtcaggtgtctgccagcgacattggcgtcatcacgccctaccggaagcaggtggagaaaatcagaattcttttgcgtaatgttgatctgatggatataaaggttggatcagtagaggagtttcaaggacaagagtatctggtcatcatcatttcgaccgtacggtcaaatgaagatagatttgaagatgatcgatattttttgggtttcttgtccaactcaaaaagatttaatgttgcaatcaccagacccaaagctttgctgatagtgctgggaaacccccatgttctcgttcgagacccctgttttggtgctttgctggaatacagtattacaaacggtgtttacatgggatgcgatttacctcctgcactgcagtctctgcaaaactgtggcgagggggtggcagacccctcctacccagtggtgccagaatccacaggaccagagaagcatcaggagcccagctgatctgcagtggctgacagcagggaggccatgtgctcagcctggccacgttgccgttacagtctgctccgtggctcctgtggcctgcccttgtctcgcagccaggcagggtcgtgtgtgggtgtggggctgccaggttggacgcagctgctgctgccctgactttggcatatgccagcctgttcctgccacagggcagtcactgccgcctaccctgaaataaaccctcgagtgaccccc

SEQ ID NO: 245 - DNA, 5525 bp, Homo sapiens
aggaaaagacaatttctctctgattcagaatcctgaaaatgtgatctcccttaaaaagaggacagtgctgctgtgagtttgacgaagtggacatcacctgcagtcagtccagagctgcccagtcttgaatataatcatggccaaaccttatgaatttaactggcagaaggaagttccctcctttttgcaagaaggagcagtttttgacagatacgaggaggaatcctttgtgtttgaacccaactgcctcttcaaagtggatgagtttggcttctttctgacatggagaagtgaaggcaaggaaggacaggtgctagaatgctccctcatcaacagtattcggtcgggagccataccaaaggatcccaaaatcttggctgctcttgaagctgttggaaaatcagaaaatgatctggaagggcggatagtttgtgtctgcagtggcacagatctagtgaacattagttttacctacatggtggctgaaaatccagaagtaactaagcaatgggtagaaggcctgagatcaatcatacacaacttcagggccaacaacgtcagtccaatgacatgcctcaagaaacactggatgaaattggcatttatgaccaacacaaatggtaaaattccagttaggagtattactagaacatttgcatcgggaaaaacagaaaaggtgatctttcaagcactcaaggagttaggtcttcccagtggaaagaatgatgaaattgagcccacagcattttcttatgaaaagttctatgaactgacacaaaagatttgtcctcggacagatatagaagatcttttcaaaaaaatcaatggagacaaaactgattatttaacggtagaccaattagtgagctttctaaatgaacatcaacgagatcctcgattgaatgaaattttatttccattttatgatgccaaaagggcaatgcagatcattgagatgtatgaacctgatgaagatttgaagaaaaaaggccttatatcaagtgatgggttttgcagatatctgatgtcagatgaaaacgccccagtcttcctagatcgtttagaactttaccaagaaatggaccatcctctggctcactacttcatcagttcttcccataacacttatctcactggcagacagttcggcgggaagtcttcggtagaaatgtacagacaggttctcctggctggttgcagatgtgttgaacttgactgctgggatggaaaaggtgaagaccaagaaccaataataactcatggaaaagcaatgtgtacagatatcctttttaaggatgtaattcaagccatcaaggaaactgcatttgtcacatcagaatatcctgtaattctctcctttgaaaatcactgcagcaaatatcaacagtacaagatgtccaaatattgcgaagatctatttggggatctcctgttgaaacaagcacttgaatcacatccacttgaaccaggcagggctttgccatcccccaatgacctcaaaagaaaaatactcataaaaaacaagcggctgaaacctgaagttgaaaaaaaacagctggaagctttgagaagcatgatggaagctggagaatctgcctccccagcaaacatcttagaggacgataatgaagaggagatcgaaagtgctgaccaagaggaggaagctcaccccgaattcaaatttggaaatgaactttctgctgatgacttgggtcacaaggaagctgttgcaaatagcgtcaagaagggcctggtcactgtagaagatgagcaggcgtggatggcatcttataaatatgtaggtgctaccactaatatccatccatatttgtccacaatgatcaactacgcccagcctgtaaagtttcaaggtttccatgtggcagaagaacgcaatattcattataacatgtcttcttttaatgaatcagtcggtcttggctacttgaagacacatgcaattgaatttgtcaattataacaaacggcaaatgagtcgcatttaccccaagggaggccgagtcgattccagtaattacatgcctcagattttctggaacgctggctgccagatggtttcactgaactatcaaaccccagatttagcgatgcaattgaatcagggaaaatttgagtataatggatcgtgcgggtaccttctcaaaccagatttcatgaggcggcctgatcgaacatttgaccccttctctgaaactcctgttgatggtgttattgcagccacttgctcagtgcaggttatatcaggtcaattcttatcagataagaaaattggcacctacgtagaggtggatatgtatgggttgcccactgacaccatacgtaaggaattccgaactcgcatggttatgaataatggactcaatccagtttacaatgaagagtcatttgtatttcggaaggtgatcctgccggacctggctgtcttgagaatagctgtgtatgatgataacaacaagctgattggccagaggatcctcccgcttgatggcctccaagccggatatcgacacatttcccttcgaaatgagggaaataaaccattatcactaccaacaattttctgcaatattgttcttaaaacatatgtgcctgatggatttggagatatcgtggatgctttatcagatccaaagaaatttctctcaattacagaaaagagagcagaccaaatgagagctatgggcattgaaactagtgacatagccgacgtgcccagtgacacttccaaaaatgacaagaaaggaaaggccaacaccgccaaagcaaatgtgacccctcagagtagctctgagctcagaccaaccaccacggctgccctggcctctggtgtggaagccaagaaaggtattgaacttatccctcaagtaaggatagaagacttaaagcagatgaaggcttacttgaagcatttaaagaaacagcagaaggagctaaattctttaaagaagaaacatgcaaaggaacacagtaccatgcagaagttacactgcacgcaagttgacaaaattgtggcacagtatgacaaagagaagtcgactcatgagaaaatcctagagaaggcaatgaagaagaaggggggaagtaattgtctcgaaatgaaaaaagaaacagaaatcaaaattcagacgctgacatcagatcacaaatctaaggtcaaagagattgtagcacagcacacaaaggaatggtcagaaatgatcaatacccacagtgctgaggagcaagaaatccgagacctgcacctcagccagcagtgtgagctgctgaaaaagctactcatcaatgcccacgagcagcaaacccagcagctgaaactgtcccatgacagggaaagcaaggaaatgcgagcacaccaggctaagatttctatggaaaatagcaaagccatcagccaagataaatctatcaagaataaagcagaacgggaaaggcgagtcagggagttaaacagcagcaacactaaaaagtttctggaagaaagaaagagacttgccatgaagcagtccaaagaaatggatcagttgaaaaaagtccagcttgaacatctagaattcctagagaaacagaatgagcagcttttgaaatcctgtcatgcagtgtcccaaacgcaaggcgaaggagatgcagcagatggtgaaattggaagccgagatggaccgcagaccagcaacagtagtatgaaactccaaaatgcaaactgaagcagcaaacccacaaagcatcaaaagactcactcacaaacttctgaacacaaactccatggatgaaagctgtttattttgtttcctttatgtgtaaacaagatgatatctgaaaccagagagacttggaatgtctgactgacttctatttaacagcttgagtattgcatttccttggccaaacaaaaatagctacaaatccacaaaaatttactattccagtaaggcagagtccaaccattgataatacaacttaaacatgtttgctataaaataccatcacaagtaaatgagcttggtgtgaacaactctcctttgtgatgccttaggacatgtttgaactgcagcaaaaaacaaaaacaaaaaacagtgcattagcaatttcatagcaagtgcatgcactaggaaaagaaaactctgtctacaagtttattagcagaagtggtggtctgctagacaaataattttgcaaaatttttctacatctaagttacctcatcagtaagtgccatgtctctaccatgccatcagaggctaatttcctgtaaaagttgtggaaattgttagaacaatagaaaaatagagcagtgtatgtgtgccaaaactcatcattactcaaaggagaactgtgttaggcacatttaagaaagtttacatctgacattgctttataggaattgtttctgcagattccggatattataattcacaccataaagattgtgaagtggttattggcaaacgtttgtaaatgtgaccatgtataaagtatttatactctttaattcacactgttagagagcaaaatcatctaagtattgccacatgacaagattagtaaacaggaatactagaactatgtttgcatgatacacaagcaccaataaagactaatccatacacagttaacctaatgccaaataaatactggttaaataaatgtatggcacagaatataatttgactatcaagacttttagcataatgaaaaaccctctctctatatatatatgtgtatatgaattatgtgggcattcttgatacttcaagttctagtttgaaaaaaatacataactaatttaattttacacaaaaatatttatgcagattttcagaatttcatatcaggaaatgacctttttatgtctgttaaatatcaaaacaatttgctacagtgttaatctgcatggtctttaagcctgctgtagttgagttgcagacagtgcatgaaaaagtattccgctgggaattgagccatgccaccaaagccaagaggagcgcatggaaacccggtagtctagaactaatcagattactgattttagggcacagcaccagatgaattgttgtatatgcttgtaaaaattgattctgtgtgttcctctgaacaaagcggagaaaatgatgataccatcaatattgaaattaaacttccaacttctctaataaaaaattaaaacacgcataacactcgtcaagagtatttgctcccaagacacattctagcaaatgttttgcctttttcatatacatgatatcatcgttattttcaaagggggcttattaataccctcagcatgtttttcacccaaatgatgcaaaacatgcagattctagttgacttcagttgtaatagacttgtttttctcctatttatgatttgaagtggattctgtaaaatatctcttgttcttagtttccttatctgtaaaacagtggagttagactacatatcttttggcactaacatctcatgaaaaattatggttaataaaatatcaccacatttggattgccaattttc

SEQ ID NO: 246 - DNA, 396 bp, Homo sapiens
atggagatgggcaaatggattcatttagagctgcggaacaggacgccctccgatgtgaaagaacttttcctggacaacagtcagtcaaatgaaggcaaattggaaggcctcacagatgaatttgaagaactggaattattaaatacaatcaacataggcctcacctcaattgcaaacttgccaaagttaaacaaacttaagaagcttgaactaagcagtaacagagcctcagtgggcctagaagtattggcagaaaagtgtccaaacctcatacatctaaatttaagtggcaacaaaattaaagacctcagcacaatagagcccctgaaaaagttagaaaacctcgagagcttagaccttttcacttgcgaggtaaccaacctgaacaactactga

SEQ ID NO: 247 - DNA, 7333 bp, Homo sapiens
agaaatccagcccttctgccctccggaggcgcctttcccaacgtaaagtacaattttaaatttcagctcctgactaaaatcatgatccgcagtcaactgctagagaatctgggcaccccggtgtctctggagcgtgcagcgagtgtgggcaagggcagggggagtgggcgaagctgctggttggtgcctgaaatctgtgcgttgcccctttaattgtgtccccagccctcgggcgtttctgtccaacgcccacgtcagcaaataccttttgtttctctcacgttggggctacttgttttagggcgcaaaggaacggcctcgaaagggggtccttccccagccgagaaccaggaatcttccctcggcccgcgcgcgcgaccggccggtgcgccgcggcccgcggacaatcctccaaacacagactgtttgacttagaatcttcccttttttactccattcaagagcagcattcataaatttccagaatggagatctcctctcatcagtctcacctcctgcagcaactgaacgagcagcgcaggcaagatgtattttgtgactgcagtattctagttgaagggaaggtcttcaaagcacatcgaaatgtattattcgctagtagcggctactttaaaatgcttctttctcagaattcaaaggagacgagtcagccaaccacagctacatttcaggctttctcccctgacacttttacagttatcttggacttcgtatattctggcaaactgtctcttactggtcagaatgtcatagaagtgatgtcggctgctagcttccttcagatgactgatgtcataagtgtatgtaagacttttattaaatcttccttagacattagtgagaaagaaaaagatcgctatttcagtctctcagataaagatgccaattctaatggtgtagaacgttcctctttttatagtggtggctggcaagaaggaagcagttctccacgttctcacctaagcccagagcaaggaacaggtataataagtggaaaatcttggaataagtataattatcatccagcctcccagaagaatactcaacaacccttggccaagcatgaaccaaggaaagagtccattaaaaagaccaaacatttgagattgtcacagccttctgaagttactcattataagtcaagcaaacgagaagtacgaacatctgattcttccagccatgtttcccagtctgaagaacaagcacagattgatgctgaaatggactctactcctgttggctatcagtacggtcaaggatctgatgtcacatccaaaagctttccagatgatctgcctcggatgcgattcaagtgcccgtactgcacacatgtggtgaagcggaaggcagacctaaagcgccaccttcgttgtcatacaggagaaaggccctatccatgtcaagcttgtggaaaaagatttagcaggctagaccatctaagtagccattttcgaacaattcaccaggcatgtaaactcatctgcagaaaatgtaaacgtcatgtgacagatctaacagggcaagtggtacaggagggaaccaggcgctacagactgtgtaatgagtgtcttgcagaatttggcatagacagcctccccattgacttggaagctgaacaacatcttatgtccccatcagatggagataaggattccagatggcacttgagtgaagatgagaatagatcctatgtggagattgtagaagatgggtctggtgatctggtcatccaacaggttgatgatagtgaagaagaagaagaaaaagaaattaagcccaacattaggtagctgtaatgtgaaccaacagagctggcatgtctgcaatttacattgacttcctgtatctctctctttctatggtcggagtctagttaacaaatttatcacactgactttaaagaaatgatctgatataacttgcatgctttctgaacaggccattgtatccattctgaactttgttgccctaaaatgtgttgctgcactggaaagaaagaactagcttgagttggcttgatggatgaacaattatcctcttactttcattacaatcctcttactttattccagagatacctttttcttttaatattggaggatctacttagcaaacttttttcaaagaaaatactttaaataaattcaccacaaccaaactttatgtaagacaatttcaaggtgtttcaaaaacacataactaccaatgtttaatttcacagggaaccagttaagagcacatttaaggatctggcaacccaccttactaaacaaattagtctttctattaatttgagatctgaaacaacctgtcattactctgatatcctgaacgtttaaggattatggaagaagactaaagtgtttgaaatcattcatatttgaaatttttatcattagcttaaaaattactctcagtattgttaaaaaaaaaaaaaagtagaggctggccaaagattatatacagatattttcttaaagcaggaaactaatgttgcctaaaagtcaaggtagtttgtgaagacaatctgtcaatatggttgtccatctctctaaagaaaagcaggctgggcgctgtggctcatgcctataatcccaatactttgggaggccgaggcaggcggatcacaaggtcaggagtttgaaaccagcctggccaacatggtgaaacctcgtctctactaaaaaatacaaaattagccgggcatggtggcgggtgcctataatcccagctactcgggaggctgaggcaggagaatcgattgaacctggaaggcagaagttgcagtgagccgagatcacaccattgcactccagcctgggcaacaagagcgaaactccgtctcaaaaaaaaaaggaaaacaaactaggaggttcttaccatatgtgagtgatttctaacgtttatgtagtgctatattatttataaagtactctctcatgtattttctcagtgaggtggatactatctccgatttacaaatgaggaaattaaggtcagaaagtctgagagagaaaactgatgattggacaggatctgattttaaacaatcctctttcagccttctctccctgtatgtctcctgaaatggcaaagaatagaagtcaaacctcaccagttggcagtcattataaaaataagccaatcagaattagaaagtatgaaaggaggaattgaatcattttcaacaacatacaatatcttgatctagagattttcaaataatgctaagtaatgtccctacagtacctattggtatgtttttatgtcacgttatttatatgtaaatttaaagtataaaactatttgaacaaattattcacttaaatatgttgaacatttttgcttctcttgtttatataatattttcaaaacaaacttttctcctagtatacaaagtttaaacttctcccctttgggctgggcccagtggctcacgcctgtaatcccagcactttgggaggctgaggcaggtggatcaccgaggtcgggagtttgagaccagcctgaccaacatggagaaaccccgtctctactaaaaatacaaaattagccgggcgtggtggtgcatgcctgtaatcccagctactcagaaggctgaggcaggaggatagcttgaacccaggaggcagaggctgcggtgggctgaggttgcgccattgcactccagcctgggcaacaagagcgaaactccgtctcaaaaaaaaaaaaaaaaaaaacttctcccctgcataaattatgaaacattccaaaattacagctaaattagagaagcattgtttcagttctaaaggtaaaatctaaatatccgaagtaaagaactgagcttcataaaggtctcttctgcaagttatcacagtgaagcttgatagaatttcactgtatatggagaggctccatctattttactgttttcttttttgtttttgtttttttttcgagacggagtctcgctctgtcgcccaggctggagtgcagtggtgcaatctcagctcactgcaagctccacctcccgggttctcgccattctcctgcctcagcctcccgagtagctgggacttacaggcgcccaccaccactcccagctaattttttgtatttttaatagagatggggtttcaccgtgttagccaggatggtctcaatctcctgatctcgtgatccgcccccctcggcctcccaaagtgctgggattacaggcgtgagccactgcgcccagccaattttactgtatttttaaatgccatgacatacctcaaaattatcctttttatgttactattttctcttgttctttcattaattattgtccttgataccaatttctaggctaaattggttactttcttttaaaaaatttaaaaatagatgaataaccacttgtttcatggtacttaattgagactttttcaagattcccctgatggcacatttgcagttgcttcaagactggatgatgtgcattgagttctctgttctcccaacatggctgttcctaaatcaggattctggtttttttgagatggactctcgctctgttgtccaagctggagtgcagtggcgtgatctcgctcaccacaacctctgcctcccgggttcaagcgattctcctgcctcagcctcctgagtagccgggactacaggcatgtgccaccatgcctggctaatttttgtatttttagtagagacagggtttcgctatgttggccaggctggtctcgaactcctgacctcgtgatctgcccgcctcagcctcccaaagtgctgggattacaggcgtgagccagcacgcccggcctaaatcaggattcttaacaattaaagtgtatctgaatgaggaaggaaacgcttgtcattctctagtcttacccaattaatactgacaccttttgaaattaaaacctgattttttagttgttggagccagtaggaaaaatggctgatttgaacttttttcctataaatgaagtagtgcttgcatgtgtgtactctaatgcactttagtctatgatctaaatgtccttttatgctattatcttctgcatgcaaactttacatacatcagcatgaatatccaacattcactgaacacagtgccaccagcacttgtaattgccttttcagaaataatgctttctcataattgtttataacgagcatcaaactatccccacaaaatgatcaagttcaccaaactagacaaagaatctgttgtatcattttaacatcatagaagaacatttaagacatgtttgtaagttgtaaataatgactccagttatagcatatatatctaagacgttagagaccagttattttctagagtgaaactgtctattgatgattgagaaaattgaattctttggtttttacatgtgggcaaatgttacataggggtataatctgtttaaataagctttatttatgccaaggattttttttttaatatcaagacttggttagaccaaagtttgctcttgcaggaatgccatttatcagcttctgaatgcccttctaactccattaccctcaagagtgtctgggtataggatgaagcattacaaaaagaaagcaccactgcagtcatgcctagtgtctgggagaaacaaaatggactagacctgcagtttaaaataatttaacccgagaaactcttcaaatgaattgtttcctaaagatgctcaaatttaagggataaactctaaaatcagagctgctgtggttaaagtcccccacaaacctttccccagacacctctgcagaactcaggtgcacaatgttgaaaaccatggaattagacaacttcctgaattccctttgagccttgcagcctcatttcgttactcctgttactcacggtgcttataagcaggtaaccatatggtctcttagtgaagcaaatcacatccttagcacatgatgttccttctatgggtatcagatcttaagactttttaaaatttaggaacaaatgtttcaatattatattttcagtaatgcaatcaaaataagcatagttactgttttctgtacggctaagtactgcctaatggatgaaagaagtttggtgcttcaattatttatgagctcagaactcaattcattaaagttattttgccaagtcatgccaagatatattgaaatttccactcatattggtttttaaaattttttttagtcctaaaattaataagtatggaaaatcactaaaagcagtgtaggataaggtgtgtttaactggccgggcacggtggctcatgcctgtaatcctagcactttgggaggccgaggcgggcggatcacttaaggccaggtgttcgagaccatcctggccaacatggtgaaaccccgtctctagtaaaaatacaaaaaatagctgggcatgatggtgggtgcctgtaatcccaggtactcgggaggctgaggcaggagaatcgcttgaacccgggaggtggaggttgcagtggccgagatcgcaccactgcactccagcctgggtgacagagcgagactccatcaaaaaaaaaaaaaaaaaaaaaaaagatgtgtttaactgggaagggtgataataatagaataataggtacaggaggaccaaactttagattataaaccagaaagttttgttattttatataagtgtatcagtattactatttatcatttatatagcattttatatttgcaaagtgtttaataatttttgttattctttacatatatatgaaataggacagttatcccacatgaacggtaaataaattgaggcacagaacagtaaaaaaacctcagggtcaggcgtggtggctcacacctgtaatcccagcactttgggaggccaaggcgggtggatcactttaggtcaagagttggagaccagcctggggcaatatagtgaaaccccttctctactaaaaatacaaaaattagccaggcatggtggtgggcacctgtaatcccagctactctgggggctgagacaggagaattgcttgaactcaggaggcggaggttgcagtgagccaagatcacgctactgcactccaggctgggtgacagagcgagactccacctcaaaaaaaaaaaaaaaaaaaaaaaaaagaacctaagacaacccagtgaaatggtagcaaaaaataggaaatataatgatcacattttctgaatcctagaccatcagcctaattcactgaggtgtgttgtgtatcactctattttatagatgattttatataagtaacagtggattgttttaaagctgacgtcattgtatgtggatacattctatatggaataaatgttatgtaaagga

SEQ ID NO: 248 - DNA, 702 bp, Homo sapiens
aacttgggagctctgtacttttaagagctaaatctattttttcttccgtagttggcaacaccattatgacatcacaacctatttccaatgagaccatcataatgctcccatcaaatgtcatcaacttctcccaagcagagaaacccgaacccaccaaccaggggcaggatagcctgaagaaacgtctacaggcaaaagtcaaagttattggggtgcatagcagcctggctggaagcattctgagtgctctgtctgccctggtgggtttcattctcctgtctgtcaacccggctgcattaaatcctgcctcattgcagtgtaagttggacgaaaaggatataccaaccagacttcttctttcttatgattatcattcaccttacaccatggactgccatagagccaaagccagtctggctggaactctgtctctgatgctggtttctactgtgttggagttctgcctagctgtgctcactgctgtgctgcagtggaaacagactgtctgacttccctggttactcatgtcctcaaagacgactcatgatgctggatatgaagaactattgacttcttgggaaaaaacggagaaatattaattggaaagttgatttttatgataatatggaaaacctaaccattataaaaaagcaaacttgagtttcctaaatgtaagcatttaaagtaatgcatatttgtttt

SEQ ID NO: 249 - DNA, 1650 bp, Homo sapiens
cctctgactcttgctgactttgaagccataaatcgctgtaacaggccattgcctaaaaactttaactttgctgcagatgtgctggaccagtggtcccaaaaggagaagacaggggagagaccagctaacccagccctgtggtgggtgaatggcaaaggggatgaggtaaaatggagcttcagagaactgggctccttgtcccgaaaagctgccaacgtgctcaccaagccctgtggcctgcagagaggagaccgtttggccgtgattctgcccagaatccctgagtggtggctggtcaatgtagcttgcatacgaacagggatcatcttcatgccgggaacaatccagctgacagcaaaagacatcctctaccggctgcgagcatccaaggccaagtgcattgtggccagtgaggaggtggccccagcggtggagtccattgtattggagtgtcctgaccttaagacaaaactcctggtgtctccacaaagctggaatgggtggctcagcttccaggagttatttcaattcgcctctgaagagcacagctgtgtggaaacaggaagtcaagaaccaatgaccatttatttcaccagtgggaccacaggctttcctaaaatggcccagcactctcagagcagcctcggcattgggttcaccctctgcggaaggtattggctggacttgaagtcctcagatatcatatggaatatgtctgacacgggctgggtcaaggccgccattggcagtgtgttttcttcctggctgtgtggagcctgtgtttttgtgcatcgaatggcacagtttgacactgacaccttcctagacacacttactacttatcccatcacgaccctgtgcagtcctcccactgtgtaccggatgctcgtgcaaaaagaccttaagagatataaattcaagagtctgcggcactgcttgaccggaggggagccactcaacccagaagtgctggagcagtggagggtgcaaactgggctggagctatatgagggctatggacagacggaagtgggaatgatttgtgccaatcagaaaggccaagaaattaaaccaggttcaatggggaaaggaatgctgccctatgatgtccagattatagatgaaaatggcaatgttctaccacctggcaaagaaggggaaattgccctcagactcaaacctacacggcccttctgtttcttctctaactatcttgacaatccacagaaaactgctgccacgataagaggagatttttatgtcactggagacagaggagtgatggacagtgatgggtatttctggtttgtcggcagagctgatgatgtcattatatcctctgggtaccgtattgggccatttgaagtggagagtgcactcattgagcatccagcagttgttgaatcggctgttgtcagtagtccagatcaaatccgcggagaggtggtgaaagcttttgttgtcttagctgcaccctttaagtcctacaacccagagaaattaactcttgaacttcaggatcatgtgaaaaaatcaactgcaccttacaaatatccaagaaaggtggaatttgttcaagaactcccaaagacaatcactgggaaaatcaaacgcaacgttttaagagaccaagaatggagaggaagatag

SEQ ID NO: 250 - DNA, 2098 bp, Homo sapiens
atctccgcctcgcttccagcccaggatgagacttctgtgagcagcgaggattttgatatgagcgactccacatggatgtcagctgacccgcacctggcctccagcctgagccccagccaggacgagaggatgcggagcccgcagaacctccacagtcaagaggacgatgactcctcctctgagagtggcagcggcaatggctcctccaccctgaacccatccacgtcgagcagcacgcagggcgaccctgccttccccgagatgaatggcaacggcgccgtggcccccatggacttcaccacggccgccgaggatcagcccatcaacctgtgtgacaagctcccgccggccacggcacttggcacagcctcctacccctcggatggctgcggtgccgacgggctgcggagccgcgtcaaatacggggtgaagaccacccccgagtcccccccctacagctctgggagctacgattccatcaagaccgaggtcagcggctgccctgaggacctgacagtgggccgggccccgacggcagatgatgacgacgatgaccacgatgaccatgaggacaatgacaagatgaacgactctgaaggcatggaccctgagcgtcttaaggccttcaacatgtttgtgcgtctctttgtggacgagaacctggaccgcatggtgcccatctccaagcagcccaaggagaagatccaggccatcatcgagtcctgcagccggcagttccctgagttccaggagcgggcccgcaagcgcatccgcacgtacctcaagtcctgccgtcgcatgaagaagaacggcatggagatgaccagacccacgccaccccatctgacctcggccatggcagaaaacatcctggcagctgcctgtgagagcgagacaagaaaggcagccaagcggatgcgtctagagatctaccagtcctcacaggatgagcccatagccctggacaagcagcactcgcgggactccgcagccatcacccactccacctactcactgccagcctcctcctactcccaggaccctgtgtacgccaacggcggcctcaactacagttaccgcgggtacggggccttgagcagcaacctgcagccccctgcctccctccaaacaggaaaccacagtaatgggcccacggacctcagcatgaaaggcggggcctctaccacctccaccacccccacgcccaccccctccagcaccagcaccagcaggcccgtgcccaccgctcagctcagccccacggagatcagcgccgtgcggcagctcatcgcgggctaccgggagtctgctgccttcctgctgcgctctgcagatgaactggaaaacctcatcctacagcagaactgaccccaccggcacctggagcgcactgccctagggaaggaggctgtcccagcctggacctggcttcctgcctcaccagttggtacattttgtttttgaaagaggtgggatccaaaagagctgtttctagccacactccaagcacctgagactttgggcacaaggacacttttttttttttttttttttttttttggaatctcaccacacgggtgctctgacctgcttggaagaggccaacggggcagctctggaagggttgggggctcccctgacaaggcgctggggctgcagctctgtttagaatcaccttcgtggaccctgatgttagaatcccacccccagataattacctttcaagtcttaggtgagcagaattgcatatttattgagaaaagcaaagtggaccctttcttcctctccccttagtaatttatttttctgaaaatggattcttttgtgtttgtacagattgctagtctgtgtctgtctgatcagaaggatgtatccccatacctaacattccatatcactacactgatgtgggctggggccagtaggggcaggacaggtgccaggctggctgttcctctgcatgcctggtgcaccctgtggccgctagcccttggccaggccatcctgttgcagatcccagtgctgccacagggacaccaccaggcacctccctaggcaacgccaagcaggaggacctcacccacacccatggcaaagc

SEQ ID NO: 251 - DNA, 2070 bp, Homo sapiens
ttgattatgtatcccttttgcttttcagtgtcttctcagaaacaaccagctgagaaggctgcaagtgacgagaaagattctgtttcgaatatagccacagaaataaaggagggaccaatatctgggacagtgtcttctcagaaacaaccagctgagaaggctgcaagtgacgagaaagattctgtttcaaatatagccacagaaataaaggatggacaacaatctgggagactgtcttctcagaaacaatcggcctggaaggttatatttaaaaagaaagtttctcttttgaatattgccacaagaataatgggtggtcagaaatctggaacagagtatcctgagaatctgcccaccatgaaggctacagttgaaaataaagattctgttctgaatacagccaccaaaatgaaggatgtacaaacatccacaccagaagaacaagacttagaaatggcatcagagggagagcaaaagaggcttgaagaatatgaaaataaccagccacaggtatcttcctattataataaagaagggagagaatgggtcataaaatcaacccaactggctatcaagagaattataccttgcagaatggcacctttggtattagaactgcctaattttgcattaaaatgtaagaatttgcttttcttactgactgttagtaatctttggaaaaagcactcaagtgtacactgtacatatagtgttttgcatgtgcaaaaattgtctcaacaactagtagtgaaaaaaaataaagtagaccgtgaaaatgacaacaaaccagatactgaacatgtttttaacccagacaaggaaaatttttgtaatgatacagaaagtatgaaagcaagaaacccagaagtagttatggttgaaataaaagaagaccagcaaatgacaaaaaaccaaaacaccacgaattggaaattaaacataggacatatgcctcaatttagtgattcaaaaaaccttttagatatgtggcttaactgctccaaagaaatgaagcatgtaattaaaaaaaaaaaagaacacaacagtacaaaaccaatacagaatgtgttccagaagctgttatatgacaactgtagtgcaaataagtatgaaagcataaaacatgaattagaaaatgtgcattattctccaccacttggtgacagaacatcagcagaaaatctcttgtgtaaaatggggttatctaaatacataattgtacgtgtaaatagattgtttttgcaagtgaaaaaccaaatacattctagggatgaccttgatgacataattcagtcatctcaaatagcctcagaggatgatgactcgctttgctctaattgtaagaaagtcatattactcattgatcaacatgaaatgaagtgcaaagaaatatgccttatgttaaaccaaagagctatgatcatttcactgtacttttctcagtgtgaatggcacgcccaatgtgtttgtttactctgcttctcttctatgccattacccatttcagctgccatttattgctataaggtatggatctcagtcctcgagctttatattgcatcattgcatacccttctctgtgccacagccagtgccttaggtgtttgctcctacaatcaggaaagattttgtcaactaaaaaaacaaaatatgttgcttcaacagcaactggatgatgctcgcaacaaagctgacaatcaagaaaaggcaatacttaatattcaagccagatgtgatgctagagtacaaaaccttcaagctgagtgcagaaagcgccgtcttttactagaagacagtaaaaggttggtaaatgaattgaatcatttgaaagaaaaagaacgccaatatgaaaaaaagcaagcagaaagagaagtaagtatcaagaaaacattgcagattcatcaggatgatgtcttaaacaaacaatcagcaacaaaagctttgctggatgcttcatcgcgtcactgcatctatttagaaaatgagatgcaggattcaaggaagaaattagaccagatgagaagtcaagtatgtatgcaactttgcacgccaacaactgttaatctgtag

SEQ ID NO: 252 - DNA, 1183 bp, Homo sapiens
cttcagaggcccggcgacctccagggctgggaagtcaaccgagctcccttccaggtcaatccaaactggagctcaactttcagaagagaaagacgccccagcaagcctctttcggggagtcctctagctcctcacctccatgggccagacagctctggcagggggcagcagcagcacccccacgccacaggccctgtaccctgacctctcctgtcccgagggcttggaagagctgctgtctgcaccccctcctgacctgggggcccagcggcgccacggttggaaccccaaagactgttcagagaacatcgaggtcaaggaaggagggttgtactttgagcggcggcccgtggcccagagcactgatggggcccggggtaagaggggctattcaaggggcctgcacgcctgggagatcagctggcccctagagcagaggggcacgcatgccgtggtgggcgtggccacggccctcgccccgctgcagactgaccactacgcggcgctgctgggcagcaacagcgagtcgtggggctgggacatcgggcgggggaagctgtaccatcagagcaaggggcccggagccccccagtatccagcgggaactcagggtgagcagctggaggtgccagagagactgctggtggttctggacatggaggagggaactctgggctacgctattgggggcacctacctggggccagcattccgcggactgaagggcaggaccctctatccggcagtaagcgctgtctggggccagtgccaggtccgcatccgctacctgggcgaaaggagagcggagccacactcccttctgcacctgagccgcctgtgtgtgcgccacaacctgggggatacccggctcggccaggtgtctgccctgcccttgccccctgccatgaagcgctacctgctctaccagtgagccctgtgataccacagactgtgctgaggtcttgccaccacccctccccttggggaggtggggaggcactgctggcctagaccagctgctgaaagctggtgaggctgagcccctaccccaacccaagctctgcggaaatcaacagccccagagccacttggagggaggaagaaagggagccggcgttcaaggctatgacagtctgctacgcaaaacattttttcaagtaaaaatagtaagagatgttgttat

SEQ ID NO: 253 - DNA, 3698 bp, Homo sapiens
aggacgccactgccctgtcgccccgcctgtgcagcccaggacctaggcgcggtagctggggctggcttttgaggggcgcgggcagccttctgactgggtcggaggcctgcgggcccgaagcctctgtccctcctgttcttgtccggcgctgcttagcccctccgcgtagtcatcatggatctgattttaaaccgaatggattatctgcaggtgggagtaacatctcagaagactatgaagctaattcctgcctcaagacacagagctacacaaaaggtggttattggagatcatgatggggtagttatgtgctttggcatgaagaaaggagaagcagcagcagtgttcaagactttacccgggccgaagattgcaaggctggaactgggaggggttatcaacacacctcaggagaaaatttttattgctgcagcatctgagattagaggcttcacaaaaagaggaaaacagttcctctcctttgaaacaaacctcactgaaagcattaaagctatgcacatatctggctcagacctctttctcagtgcaagttacatctataaccattattgtgactgcaaagaccaacattattacctttctggggataaaatcaatgatgtgatctgccttccagtggaaagattatctcgtatcacacctgtattggcctgccaggacagagtgctcagagttttacagggatctgatgtgatgtatgcagttgaagttcctggaccccctactgtcttagcactacacaatggaaatggcggtgactctggagaagaccttttgtttgggacatcagacggaaaacttgcgcttatacagattactacatccaaaccagtacgcaagtgggaaattcaaaatgagaaaaagagaggaggtattttgtgtattgacagctttgacattgtgggtgatggggttaaagatttacttgttgggagagatgacggaatggtggaagtgtatagttttgataatgcaaatgaacctgttctacgatttgatcagatgttgtctgaaagcgtcacatctatccagggtggttgtgtaggaaaagacagctatgatgaaatcgtggtgtccacatattcaggctgggttacaggtctgacaacagagcccattcataaggaaagtggaccaggagaagaactaaaaattaatcaggagatgcagaataaaatttcttccttacggaatgagttggaacatttgcagtataaggtattgcaggaaagagagaattatcaacagtcttctcaatcaagcaaagcaaaatcagcagtaccttcctttggtataaatgataaatttacactaaataaagatgatgccagttacagccttatcttagaggtacagactgcaatagataatgtcttaatacagagtgatgttccaatagatttacttgatgtggataaaaattctgctgttgttagctttagcagctgtgattctgagtcaaacgacaacttccttcttgccacttatcggtgccaggcagatactacaaggctggaactcaagattcgctcaattgaaggccagtatggcacactacaagcatatgtgactccaagaattcaacccaaaacctgtcaggtccgccagtaccacatcaaacctctttcactccatcaaagaactcactttattgatcatgacagacccatgaatacactgaccctaacaggccagttcagttttgctgaagttcactcctgggtggttttttgtctgcctgaagttccagaaaaacctccagcaggagaatgtgtgacattttactttcagaacacctttctagatacacaacttgaaagtacctacagaaaaggagagggagtttttaaatctgacaacatttctactatctccatcctaaaagatgtgctttctaaagaagctacaaaaaggaaaattaacctcaacatatcatacgagataaatgaagtatcagtcaaacacactttaaagctaatccacccaaagctggagtaccagttgcttttggctaagaaagtgcagttaattgatgctttaaaagaattacagattcatgagggaaatacgaactttctgataccagaatatcactgtattctagaagaggcagatcacctacaggaagaatacaaaaagcaacctgcacatcttgaaagactctatggcatgatcactgatcttttcatagataaatttaagtttaaaggcaccaatgtaaaaactaaagtaccccttctattggaaattctggacagttatgaccaaaatgcattgatttcattcttcgatgcagcatgacatacaaataaggtaaagtcccaaagaagtggtctgtttaaatgaaaaatgttaaaagagaattagaagttaactgtgtatgtactttaatttcaaatgcttttttatatctaaaaatatttgagatataatggctttttaaagtaatgcttctatttcttttgacaaattgaactttctaaaactaaaagagtctttttatttttaaaacacaagtagaatgatttaaataggattttaatgaatttttggcaagtggctgttttaatttttaaattgagaagtaatatgtggaaaattaaaatatattcaaatgtattacaaggtacataaacacataaacatgtagaccgctttataggcttcaaaatgtatttttatatattaccttatttgatcttcacaactgttgtaaaatttgtcaaatcatataagaaaactgattctcagtgaaattttgtgattaagaggacatgctaatattttgtaaagctgggaccagaacccaagtactggtacttgctttgtgtcctggttactatgtatgttgccagctagtggaaataacctaccaattgttttttctaggagataggattgatttgcaactgatattccttttgcttggtagtgttttatgactctgctgcagtttgtggaaatgctggacttggctcagtgctataaattgtagccaggaaataagaagagcttacacagagtcgggggatcttaattagacatgctgtaaccagtggagctattcagcgtgcttcaagtgaagagtgcagaaatagtgatgccatcttagattttcctacactagtatcttctagatctctttttatcatatatgacattaaggctacagaagttttgtgcattaatcttaattcatatttattaatttcaagggaatattgaaaggttttaaaatggcatacagataatggaaaataagctttatgtttcaagaagggcagactcacgaattttttagaaaacagtgcttcttaatgatatgctattatacttattagttatgtgcaagctttgtatattcttatatttatatataaatataaaaatttgttaaaggcacgtatagttaagagagttttattttaataaggtcatattgtttttactatgtttaaaaaactttacttctgaaaggaacataattatatctaggtcactagaacgtcattgtgttttttgttggttgccacagcttggggaaaaatagaaaaaaattaatgactgtatttgaatattttgtaatgcactgctatttattatatatatcaacagtagttcaaggtgccatcttaaattaattgcatcttcattaggaaaaataaaaagcataaaac

SEQ ID NO: 254 - DNA, 4869 bp, Homo sapiens
cattctgctggctgcgcggtggcggcggctgtgtgtgcgccgcgccttgccgccccccctggccccccgagcccggggcgcgcgctcccgcccgggccgtccgggccccgcggcgccgcggcccgaggccccgggaagcgcagccatggctctgcggaggctgggggccgcgctgctgctgctgccgctgctcgccgccgtggaagaaacgctaatggactccactacagcgactgctgagctgggctggatggtgcatcctccatcagggtgggaagaggtgagtggctacgatgagaacatgaacacgatccgcacgtaccaggtgtgcaacgtgtttgagtcaagccagaacaactggctacggaccaagtttatccggcgccgtggcgcccaccgcatccacgtggagatgaagttttcggtgcgtgactgcagcagcatccccagcgtgcctggctcctgcaaggagaccttcaacctctattactatgaggctgactttgactcggccaccaagaccttccccaactggatggagaatccatgggtgaaggtggataccattgcagccgacgagagcttctcccaggtggacctgggtggccgcgtcatgaaaatcaacaccgaggtgcggagcttcggacctgtgtcccgcagcggcttctacctggccttccaggactatggcggctgcatgtccctcatcgccgtgcgtgtcttctaccgcaagtgcccccgcatcatccagaatggcgccatcttccaggaaaccctgtcgggggctgagagcacatcgctggtggctgcccggggcagctgcatcgccaatgcggaagaggtggatgtacccatcaagctctactgtaacggggacggcgagtggctggtgcccatcgggcgctgcatgtgcaaagcaggcttcgaggccgttgagaatggcaccgtctgccgaggttgtccatctgggactttcaaggccaaccaaggggatgaggcctgtacccactgtcccatcaacagccggaccacttctgaaggggccaccaactgtgtctgccgcaatggctactacagagcagacctggaccccctggacatgccctgcacaaccatcccctccgcgccccaggctgtgatttccagtgtcaatgagacctccctcatgctggagtggacccctccccgcgactccggaggccgagaggacctcgtctacaacatcatctgcaagagctgtggctcgggccggggtgcctgcacccgctgcggggacaatgtacagtacgcaccacgccagctaggcctgaccgagccacgcatttacatcagtgacctgctggcccacacccagtacaccttcgagatccaggctgtgaacggcgttactgaccagagccccttctcgcctcagttcgcctctgtgaacatcaccaccaaccaggcagctccatcggcagtgtccatcatgcatcaggtgagccgcaccgtggacagcattaccctgtcgtggtcccagccggaccagcccaatggcgtgatcctggactatgagctgcagtactatgagaaggagctcagtgagtacaacgccacagccataaaaagccccaccaacacggtcaccgtgcagggcctcaaagccggcgccatctatgtcttccaggtgcgggcacgcaccgtggcaggttacgggcgctacagcggcaagatgtacttccagaccatgacagaagccgagtaccagacaagcatccaggagaagttgccactcatcatcggctcctcggccgctggcctggtcttcctcattgctgtggttgtcatcgccatcgtgtgtaacagaagacgggggtttgagcgtgctgactcggagtacacggacaagctgcaacactacaccagtggccacatgaccccaggcatgaagatctacatcgatcctttcacctacgaggaccccaacgaggcagtgcgggagtttgccaaggaaattgacatctcctgtgtcaaaattgagcaggtgatcggagcaggggagtttggcgaggtctgcagtggccacctgaagctgccaggcaagagagagatctttgtggccatcaagacgctcaagtcgggctacacggagaagcagcgccgggacttcctgagcgaagcctccatcatgggccagttcgaccatcccaacgtcatccacctggagggtgtcgtgaccaagagcacacctgtgatgatcatcaccgagttcatggagaatggctccctggactcctttctccggcaaaacgatgggcagttcacagtcatccagctggtgggcatgcttcggggcatcgcagctggcatgaagtacctggcagacatgaactatgttcaccgtgacctggctgcccgcaacatcctcgtcaacagcaacctggtctgcaaggtgtcggactttgggctctcacgctttctagaggacgatacctcagaccccacctacaccagtgccctgggcggaaagatccccatccgctggacagccccggaagccatccagtaccggaagttcacctcggccagtgatgtgtggagctacggcattgtcatgtgggaggtgatgtcctatggggagcggccctactgggacatgaccaaccaggatgtaatcaatgccattgagcaggactatcggctgccaccgcccatggactgcccgagcgccctgcaccaactcatgctggactgttggcagaaggaccgcaaccaccggcccaagttcggccaaattgtcaacacgctagacaagatgatccgcaatcccaacagcctcaaagccatggcgcccctctcctctggcatcaacctgccgctgctggaccgcacgatccccgactacaccagctttaacacggtggacgagtggctggaggccatcaagatggggcagtacaaggagagcttcgccaatgccggcttcacctcctttgacgtcgtgtctcagatgatgatggaggacattctccgggttggggtcactttggctggccaccagaaaaaaatcctgaacagtatccaggtgatgcgggcgcagatgaaccagattcagtctgtggaggtttgacattcacctgcctcggctcacctcttcctccaagccccgccccctctgccccacgtgccggccctcctggtgctctatccactgcagggccagccactcgccaggaggccacgggccacgggaagaaccaagcggtgccagccacgagacgtcaccaagaaaacatgcaactcaaacgacggaaaaaaaaagggaatgggaaaaaagaaaacagatcctgggagggggcgggaaatacaaggaatattttttaaagaggattctcataaggaaagcaatgactgttcttgcgggggataaaaaagggcttgggagattcatgcgatgtgtccaatcggagacaaaagcagtttctctccaactccctctgggaaggtgacctggccagagccaagaaacactttcagaaaaacaaatgtgaaggggagagacaggggccgcccttggctcctgtccctgctgctcctctaggcctcactcaacaaccaagcgcctggaggacgggacagatggacagacagccaccctgagaacccctctgggaaaatctattcctgccaccactgggcaaacagaagaatttttctgtctttggagagtattttagaaactccaatgaaagacactgtttctcctgttggctcacagggctgaaaggggcttttgtcctcctgggtcagggagaacgcggggaccccagaaaggtcagccttcctgaggatgggcaacccccaggtctgcagctccaggtacatatcacgcgcacagcctggcagcctggccctcctggtgcccactcccgccagcccctgcctcgaggactgatactgcagtgactgccgtcagctccgactgccgctgagaagggttgatcctgcatctgggtttgtttacagcaattcctggactcgggggtattttggtcacagggtggttttggtttagggggtttgtttgttgggttgttttttgttttttggttttttttaatgacaatgaagtgacactttgacatttcctaccttttgaggacttgatccttctccaggaagaaggtgctttctgcttactgacttaggcaatacaccaagggcgagattttatatgcacatttctggatttttttatacggttttcattgacactcttccctcctcccacctgccaccaggcctcaccaaagcccactgccatggggccatctgggccattcagagactggagtgagatttgggtgtggagggggaggcgccaaggtggaggagcttcccactccaggactgttgatgaaagggacagattgaggaggaagtgggctctgaggctgcagggctggaagtccttgcccacttcccactctcctgccccaatctatctagtacttcccaggcaaataggcccctttgaggctcctgagtgccctcagatggtcaaaacccagttttccctctgggagcctaaaccaggctgcatcggaggccaggacccggatcattcactgtgataccctgccctccagagggtgcgctcagagacacgggcaagcatgcctcttcccttccctggagagaaagtgtgtgatttctctcccacctccttccccccaccagacctttgctgggcctaaaggtcttggccatggggacgccctcagtctagggatctggccacagactccctcctgtgaaccaacacagacacccaagcagagcaatcagttagtgaattgaatggaaataaacgctttagttataatatga

SEQ ID NO: 255 - DNA, 742 bp, Homo sapiens
agctaatttaaggctggacacagagtcagcaacacacaagacatcatcttgaaggaaggatggctttggccagaccaagaccgagacttggagacctgattgagatttctcgctttggctatgcacactgggccatctacgtgggagatggctatgtggtccatctggctccggcaagtgaaattgctggagctggtgcggccagtgtcctgtctgccctgaccaacaaagccatagtgaagaaggaactgctgtctgtggtggctgggggagacaactacagggtcaataacaagcacgatgacagatacacaccactgccttccaacaaaatcgtcaagcgggcagaggagttggtggggcaggagttgccttattcgctgaccagtgacaactgcgagcacttcgtgaaccatctgcgctatggcgtctcccgcagtgaccaggtcactggtgcagtcacgacagtaggtgtggcagcaggcctgctggctgccgcaagccttgtggggatcctgctggccagaagcaagcgggaaaggcaataaatccaagaaattgtcccaacaaccaccaattcttacggaggaatattatttagccagcaggagtggagtttggtttactgattttactgttttgtgttcatgaatctttattttaatggagttaaaagcacaggaaaatgtatttggaaatgcagcttagtatgaattctattaaagacacaattgggctctgc

SEQ ID NO: 256 - DNA, 794 bp, Homo sapiens
tcaggtcaggatgggcaccgtgcgcccacctcgcccctcgctcctgctggtctccacccgggagtcttgtctcttcctcctcttctgcctgcacctgggcgccgcctgcccacagccctgccggtgccctgaccacgcaggggctgtggctgtcttctgcagcttgcggggccttcaggaggtccccgaggacatcccggccaacaccgtgctcctgaagctcgatgccaacaagatctcccacctcccggacggggccttccagcacctgcaccggctcagggagctggatctgtctcacaacgccatcgaggccatcggctccgccaccttcgcgggcctggccgggggcctgcggctgctggacctgtcttacaaccgcatccagaggatccccaaggacgccctgggcaaactcagcgccaagatacgcctgtcccacaaccccctgcactgcgagtgcgccctgcaggaggccctgtgggagctgaagctggaccccgactctgtggacgagatcgcctgccacacctcagtgcaggaggagtttgtggggaagcctctggttcaggctctggatgcgggtgccagcctctgcagcgtcccccacaggaccacagacgtggccatgctggtcaccatgttcggctggttcgccatggtgatcgcctacgtcgtgtactatgtgcgccacaaccaggaggatgcccggaggcacctggagtacctgaagtctctgcccagcgcccccgcctccaaggaccccatcggcccggggccctagcgcctgttcc

SEQ ID NO: 257 - DNA, 5669 bp, Homo sapiens
aatcgtccgccgctcccgttaccggggcaaccgcggcgcctcctccgtgtcggccccgatcgtccctccgcgccattttcaaactgctctagcgccggagcccgtgcctggacggaaggagctagtgggggactcgaggcctgagggcaatgcggctggaggcggaggcaacggcggctggagctgccggactttaatttttggaagtgaataaaacttgttttagaagacgagatgactacagctgtagagagaaagtatattaatattaggaaaaggctggatcagctgggataccgccagactctgacagtggagtgtttacctttggtagaaaaacttttcagcgacttagttcatacaactgagagccttcggcaatcaaaattatctgctgtgaaagctgaaaaagaaagtgccaattttgattttgttttggaaccctataaacttgaaaatgcaagattgagtagagaaaataatgaattatacctagagttaatgaaactgagagaacattcagaccaacacgttaaagagttgaaaacttcattgaagaaatgtgcacgtgaaacagctgatctgaaatttctgaataaccaatatgctcataaactcaaactgttggagaaagagagcaaagctaagaatgaaagaattcaacaacttcaagaaaagaatttgcatgctgtagtacaaactccaggtggcaagaaaagaagtattgctttcaggcgccagcgtatgcaaattgatgaaccggttcctccctctgaagtcagttcatatccagttcctcaaccagatgacccttacattgcagacctccttcaagtggctgataacaggattcaagaacttcaacaggaagtccaccagctacaagaaaagttagcaatgatggaaagtggggtgagagactatagcaagcagattgagctaagagaacgagagatagaacgactgtcagttgctttggatggtggtcggtcccctgatgtcctttctctggagtctagaaataaaaccaatgaaaagcttattgctcatttaaatattcaggttgactttcttcagcaagctaataaagacctggagaagcgtatacgagagcttatggaaaccaaggaaacagtgacatctgaagtcgttaatttaagtaacaaaaatgaaaaactctgccaagaattaactgaaatagatcagttagcacagcagttggaaagacataaagaagaagtgcttgagactgctgataaagagcttggggaagcaaagaaagagattaaaagaaagctctctgaaatgcaggatcttgaagaaacaatggcaaaacttcagctggaattgaacttatgccagaaagaaaaggagagactgagtgatgaactccttgtaaaatcagacctagaaactgttgttcatcagcttgaacaagaaaagcaaagacttagcaaaaaagttgaaagttttgcagttacagaacgacaacttactctggaggttgagaggatgagactagaacatggaataaaacgtcgagacaggtcaccttctcgtttagatacatttctgaaaggtatagaagaagaacgagattattataagaaagagctagagagactccaacatataatacagcgaagatcttgctctacaagttatagcgcacgtgaaaaaagttcaatatttagaacaccagaaaagggtgattacaattcagaaattcatcagatcacaagagaaagagatgaacttcagcgtatgctagaaagatttgaaaaatatatggaagatatacagtccaatgttaaattattgacagcagaaagagataaactaagtgtcttatataatgaagctcaggaagaattatctgccctaagaaaggaatccacccaaaccacagcaccccataatattgttagtcttatggaaaaggaaaaagaacttgcgttatctgacttaagaagaattatggcagaaaaggaagctttaagagaaaaattagagcatattgaagaagtgagtctttttggaaaatcagaattagagaaaactattgaacatttgacatgtgttaatcatcagcttgaaagcgaaaaatatgaattaaagtctaaagtgttaataatgaaagaaacaatagagtcgttagagaacaaattaaaagtccaagctcaaaaatttagccatgtggctggtgactcatctcatcagaaaacagaggtgaactcacttaggatagtgaatgagcagctacagcggtcagttgatgactatcagcaccgactttccataaaaagaggtgaacttgaatcagcccaagcacaaattaaaatactggaggaaaagatagatgaactaaaccttaagatgacttcacaggatgaggaggctcatgtaatgaaaaagaccattggtgttattgataaagaaaaagactttctccaggagactgtagatgagaagacagaaaagattgcaaatttgcaagaaaacctagctaataaagaaaaagctgttgctcaaatgaagataatgatctcagagtgtgaatcatctgtgaaccagctgaaagaaacattggttaatcgagatcgtgagataaacagcctccggcgccagcttgatgcagctcacaaagaactcgatgaagtaggaagatctagagaaatcgcttttaaggaaaacagaagactgcaagatgacctggctacaatggcaagagaaaatcaagaaatctcattggaattggaagcagcagtgcaagaaaaagaagaaatgaagagcagagttcataaatacataacagaggtgtcacgatgggagagcttaatggctgccaaggaaaaagaaaatcaagatttgttagatagatttcagatgcttcataaccgtgctgaagactgggaggtcaaagcccatcaagctgagggagaaagcagctcagttcgactggaacttctttctattgacactgagaggagacatcttcgagaaagagtggagctattagaaaaagaaattcaagagcacataaatgcccatcatgcttatgaatctcagatctcatcaatggcaaaagccatgtctcgattagaagaagagctgagacatcaagaagatgagaaagcaacagtattaaatgacttgtcatctcttagagaactttgcattaaacttgattcaggcaaagatattatgacccagcaattgaattcgaaaaaccttgagtttgagagggttgtggtggaattagaaaatgtaaagtcagagtcagacctactgaaaaaacaactttcaaatgagagacatacagttaaaaacctcgaatcattgttggctacaaacagagataaagaatttcattctcacttaacctcccacgagaaggatacagaaatccagctacttaaggagaagttaaccctttctgaaagcaaattaactagtcaaagccgggaaaacaccatgcttcgagctaaagtggcacagttacaaacagattatgatgctctgaaaaggcagatctcaactgaaagatacgaacgagaacgagcaatccaagagatgcgtcgacatggtcttgctacaccaccccttagttccactctgaggtctccttcacattctcctgaacatagaaatgtgtaattatcagaaagaataatggctttcaatgagttcctatgtggatttttaaaagaacagaacagtaatgaaatatttgaagtacttgttgctgaaaatcatgaacatggacacaaattctacctctgtcaacttttatttaaatcagtgaatatgttaaaaagtttggtttaaaagaactatatctatatgtatattttcatatatatgacagaacaagaatatgtattaatagtgcctaatgtatctatatttttattattcatgaattaaattactaaaagtatgtttatactgtgaattaatataatgtattcacattattctttaataatctgtttattaataagccatgatatgtgtatgtaaatattcttacagtacttgtttttagttgtcatgcctatgtttagaccatatcttaatgtattcacaaagaattatcaactttgatgctatgctgtcatgcttaactttttcttcttaaaattattcatagatctactgtctgttgtcaaggggaatatattcaggtctagtcttcttataatagcagaggtcttggtaaaataactaccatatataacgtgttattgccatctagaagaactatgatgagaaagatacatttatatattatgtaaaatgttaactatcatcatatggactctatgtaacacaaattcaaaagcaaactaaaagctatatgcagagttttgtataaaacaatagaacagaaatttgggacatttttctaggaaataaaattcctcggtgtattaatctaaggtttcaaagtataaaagtatatggggtaggccgggtgcagtggctcacgcctgtaatcccagcactttgggaggccgaggcgagtggatttcctaaggtcaggagtttgagaccagcctgagcaatgtggtgaaaccccatctctactaaaaatacaaaaattatctgggcttggtggcgggcacctgtaatcccagccacttgggaggctgaggcaggagaattgcttgaacccgggaggtggaggctgcggtgagccaagatcatgccattgcactccagcctgggtgacagagtaacactctgtctcagaaaaaaaaaaaaagaaaaatatatggggtaaatacagtaaaacgttttgttaaattccaatatacattcagtgataccactctttttcttctaagcctgtgtgttataatttaccagttccccaaaatgccatttttaacgccgaactgtgtaatatacatggaaaacagctttttacaattaattttcaaagttgtaattttaaagaatttgggtgtatacctatgttaatgaaacaacagaagtacaaaaaagaatatcagatacaaaaatcaatcgtgaagaaaatctgttcttaatatatttcattatgattgaaaaacataaaaactaacataggaaagtgaatgatcagttacttatgatatattttgtttcctcttgtggtttaataaagtgaagtgtgtgtgtgtgtgtgtgtgtgtatacctgggggtgggcagtgctctttttctaaaactaatatggcttatatatctgaattatgccctttttagtgtgtattaggatgtgggctggtttgcttttctaccacctttgtaattttatgtatcccatctcctttgtgtgaattcatatattatagcaaaatacaagagacatgggactgtttgcaataccatatggaaatcttttaataaatatatgtaaataaaataaaaaatatttgtctccaccttttccccaaaagcaacagcaagacatattttgttagatattttatttttaatgttttctataatttaaaaatgtatagcctgccaaatgttgttttcataaccatgatattgttttgaaaaaattttatcttaaaatactgaatgttctgaccttttatagatgtttttgattttgttttaaataattttaaattatggagcttgacctagatttgccaataaactttctagcct

SEQ ID NO: 258 - DNA, 2619 bp, Homo sapiens
gagctgtccctgcggcgcgtctgccttggcggagccgaccgcagtgcgctcaggcgtccggtgcgtccccagcctccgccccggcgcgggggcgacggactcgcgcgtgcgcagcgccggaggggcgcgggctgggaccccctagccagcgcgtgcgccgatcgagcgcagggcgatgggtgggcgccgggcgccgggcgccaggcagtgatgggccttcccgcgctgcggccccactgaggaggaggctcggggacagcaggagcacgggctgcccgcgcggtgcggaccatggcgttcctggccgggccgcgcctgctggactgggccagctcgccgccgcacctgcagttcaataagttcgtgctgaccgggtaccggcccgccagcagcggctcgggctgcctgcgcagcctcttctacctgcacaacgaactgggcaacatctacacgcacgggctggccctgctgggcttcctggtgctggtgccaatgaccatgccctggggtcagctgggcaaggatggctggctgggaggcacacattgcgtggcctgccttgcaccccctgcaggctccgtgctctatcacctctttatgtgccaccaagggggcagcgctgtgtacgcccggctcctcgccctggacatgtgtggggtctgccttgtcaacacccttggggccctgcccatcatccactgcaccctggcctgcaggccctggctgcgcccggctgccctggtgggctacactgtgttgtcgggtgtggccggctggcgtgctctcaccgccccctccaccagtgctcggctccgggcatttggatggcaggctgctgcccgcctactggtatttggggcccggggagtgggtctgggttcaggggctccaggctccctgccctgctacctgcgcatggacgcactggcgctgcttgggggactggtaaatgtagcccgtctgcccgagcgctggggacctggccgctttgactactggggcaactcccaccagatcatgcacctgctgagcgtgggctccatcctgcagctgcacgccggcgtcgtgcccgacctgctctgggctgcccaccacgcctgtccccgggactgagctgccatgccagcctgcccacagcagcctcctagagttagcaacaccaggtgttcctcccaactcgtctgcaaggggctggctccttggatgcttccagctcatgagatgtctcagcaggagccctgttcacccgttcttccctgtggactgacctcttccacccacgccgtggcgctccaacttccttccctgccttttccctccaagctcctattttactgtgtcagctggaaggaaacctttccctcttgggacctctttaccctctgtgacctgtggggttagaccagagagggactctggggtcacgtcttgctctgagagttcaagtcctgccaggccgccagcccagagcctcctcaccctatcctgttcctcccaccaggcctgtggccagtcttcctgatctccatctttctgccctgcataccagccctcccagcagccacaagcttgcccgccctggctccctctgcccagagactatggagtaaggcattcaggacaaaaggaccaagggggcgtggacccgtcttgtaccagctggccacaggcacaagggctgcagctgcttcttccaggaaactgacacagggagctcagcggcctcagatcctgggacccctgggccgtgcctgccctccaccttgagtgccatactcccaacagctccaggtacccaccgggggatgtgcctgctcaggaaacctctttgctccacacagcatggggcttcagctgctggcccaaggccaggagcgctgggttctgcagcagggctcagcctcaggggcgttaagaccctggatgacatcaataaagggacaggaagggccatgttgccacatgagcaagcttgggtgctcccaaggttcaaatactttttattagacacggccaggcagagaagaccatgggagttcccgaggggccccagctttcaagggcgacgggagagacacaggataaaaggttaaaagtgcagaggcagagtctggggctcaggttgggtctagggtgtcctcaaacaggctgaggaggttccgaggctcaaaggaggggaaggagccccgaggaggctctgagttgatgtcacttaggtccagggcatccctgggaggagagagtagtgacactcaggatccaaaagctagccctgcccaccccagcccctggacctgcttacctgggtgtgcacctgctccggggggtggaggtgctccccacagtccgggccaggacagcctcaggggagagtgaaggcctgcaggagggcaggcgagacaaggagggtgtccagggctagggagtgccggatgaaaccagctctgtccctgtgcaggctccaggctcccgcctgacaaacaggcagggagccacagtcagggacaataaaaacttggtgcactctgaaagcagcacttggacagccttcaaagtccttccatctggctgcactccaaggccccctctgtccttttcagaacacatggacttggaggc

SEQ ID NO: 259 - DNA, 9215 bp, Homo sapiens
gcggccgccccgagacgccggccccgctgagtgatgagaacagacgtcaaactgccttatgaatattgatgcggaggctaggctgctttcgtagagaagcagaaggaagcaagatggctgccctttaggatttgttagaaaggagacccgactgcaactgctggattgctgcaaggctgagggacgagaacgaggctggcaaacattcagcagcacaccctctcaagattgtttacttgcctttgctcctgttgagttacaacgcttggaagcaggagatgggctcagcagcagccaataggacatgatccaggaagagcagtaagggactgagctgctgaattcaactagagggcagccttgtggatggccccgaagcaagcctgatggaacaggatagaaccaaccatgttgagggcaacagactaagtccattcctgataccatcacctcccatttgccagacagaacctctggctacaaagctccagaatggaagcccactgcctgagagagctcatccagaagtaaatggagacaccaagtggcactctttcaaaagttattatggaataccctgtatgaagggaagccagaatagtcgtgtgagtcctgactttacacaagaaagtagagggtattccaagtgtttgcaaaatggaggaataaaacgcacagttagtgaaccttctctctctgggctccttcagatcaagaaattgaaacaagaccaaaaggctaatggagaaagacgtaacttcggggtaagccaagaaagaaatccaggtgaaagcagtcaaccaaatgtctccgatttgagtgataagaaagaatctgtgagttctgtagcccaagaaaatgcagttaaagatttcaccagtttttcaacacataactgcagtgggcctgaaaatccagagcttcagattctgaatgagcaggaggggaaaagtgctaattaccatgacaagaacattgtattacttaaaaacaaggcagtgctaatgcctaatggtgctacagtttctgcctcttccgtggaacacacacatggtgaactcctggaaaaaacactgtctcaatattatccagattgtgtttccattgcggtgcagaaaaccacatctcacataaatgccattaacagtcaggctactaatgagttgtcctgtgagatcactcacccatcgcatacctcagggcagatcaattccgcacagacctctaactctgagctgcctccaaagccagctgcagtggtgagtgaggcctgtgatgctgatgatgctgataatgccagtaaactagctgcaatgctaaatacctgttcctttcagaaaccagaacaactacaacaacaaaaatcagtttttgagatatgcccatctcctgcagaaaataacatccagggaaccacaaagctagcgtctggtgaagaattctgttcaggttccagcagcaatttgcaagctcctggtggcagctctgaacggtatttaaaacaaaatgaaatgaatggtgcttacttcaagcaaagctcagtgttcactaaggattccttttctgccactaccacaccaccaccaccatcacaattgcttctttctccccctcctcctcttccacaggttcctcagcttccttcagaaggaaaaagcactctgaatggtggagttttagaagaacaccaccactaccccaaccaaagtaacacaacacttttaagggaagtgaaaatagagggtaaacctgaggcaccaccttcccagagtcctaatccatctacacatgtatgcagcccttctccgatgctttctgaaaggcctcagaataattgtgtgaacaggaatgacatacagactgcagggacaatgactgttccattgtgttctgagaaaacaagaccaatgtcagaacacctcaagcataacccaccaatttttggtagcagtggagagctacaggacaactgccagcagttgatgagaaacaaagagcaagagattctgaagggtcgagacaaggagcaaacacgagatcttgtgcccccaacacagcactatctgaaaccaggatggattgaattgaaggcccctcgttttcaccaagcggaatcccatctaaaacgtaatgaggcatcactgccatcaattcttcagtatcaacccaatctctccaatcaaatgacctccaaacaatacactggaaattccaacatgcctggggggctcccaaggcaagcttacacccagaaaacaacacagctggagcacaagtcacaaatgtaccaagttgaaatgaatcaagggcagtcccaaggtacagtggaccaacatctccagttccaaaaaccctcacaccaggtgcacttctccaaaacagaccatttaccaaaagctcatgtgcagtcactgtgtggcactagatttcattttcaacaaagagcagattcccaaactgaaaaacttatgtccccagtgttgaaacagcacttgaatcaacaggcttcagagactgagccattttcaaactcacaccttttgcaacataagcctcataaacaggcagcacaaacacaaccatcccagagttcacatctccctcaaaaccagcaacagcagcaaaaattacaaataaagaataaagaggaaatactccagacttttcctcacccccaaagcaacaatgatcagcaaagagaaggatcattctttggccagactaaagtggaagaatgttttcatggtgaaaatcagtattcaaaatcaagcgagttcgagactcataatgtccaaatgggactggaggaagtacagaatataaatcgtagaaattccccttatagtcagaccatgaaatcaagtgcatgcaaaatacaggtttcttgttcaaacaatacacacctagtttcagagaataaagaacagactacacatcctgaactttttgcaggaaacaagacccaaaacttgcatcacatgcaatattttccaaataatgtgatcccaaagcaagatcttcttcacaggtgctttcaagaacaggagcagaagtcacaacaagcttcagttctacagggatataaaaatagaaaccaagatatgtctggtcaacaagctgcgcaacttgctcagcaaaggtacttgatacataaccatgcaaatgtttttcctgtgcctgaccagggaggaagtcacactcagacccctccccagaaggacactcaaaagcatgctgctctaaggtggcatctcttacagaagcaagaacagcagcaaacacagcaaccccaaactgagtcttgccatagtcagatgcacaggccaattaaggtggaacctggatgcaagccacatgcctgtatgcacacagcaccaccagaaaacaaaacatggaaaaaggtaactaagcaagagaatccacctgcaagctgtgataatgtgcagcaaaagagcatcattgagaccatggagcagcatctgaagcagtttcacgccaagtcgttatttgaccataaggctcttactctcaaatcacagaagcaagtaaaagttgaaatgtcagggccagtcacagttttgactagacaaaccactgctgcagaacttgatagccacaccccagctttagagcagcaaacaacttcttcagaaaagacaccaaccaaaagaacagctgcttctgttctcaataattttatagagtcaccttccaaattactagatactcctataaaaaatttattggatacacctgtcaagactcaatatgatttcccatcttgcagatgtgtaggtaagtgccagaaatgtactgagacacatggcgtttatccagaattagcaaatttatcttcagatatgggattttccttctttttttaaatcttgagtctggcagcaatttgtaaaggctcataaaaatctgaagcttacattttttgtcaagttaccgatgcttgtgtcttgtgaaagagaacttcacttacatgcagtttttccaaaagaattaaataatcgtgcatgtttatttttccctctcttcagatcctgtaaaatttgaatgtatctgttttagatcaattcgcctatttagctctttgtatattatctcctggagagacagctaggcagcaaaaaaacaatctattaaaatgagaaaataacgaccataggcagtctaatgtacgaactttaaatattttttaattcaaggtaaaatatattagtttcacaagatttctggctaatagggaaattattatcttcagtcttcatgagttgggggaaatgataatgctgacactcttagtgctcctaaagtttccttttctccatttatacatttggaatgttgtgatttatattcattttgattcccttttctctaaaatttcatctttttgattaaaaaatatgatacaggcatacctcagagatattgtgggtttggctccataccacaataaaatgaatattacaataaagcaagttgtaaggactttttggtttctcactgtatgtaaaagttatttatatactatactgtaacatactaagtgtgcaatagcattgtgtctaaaaaatatatactttaaaaataatttattgttaaaaaaatgccaacaattatctgggcctttagtgagtgctaatctttttgctggtggagggtcgtgcttcagtattgatcgctgtggactgatcatggtggtagttgctgaaggttgctgggatggctgtgtgtgtggcaatttcttaaaataagacaacagtgaagtgctgtatcaattgatttttccattcacaaaagatttctctgtagcatgcaatgctgtttgatagcatttaacccacagcagaatttctttgaaaattggactcagtcctctcaaactgtgctgctgctttatcaactaagtttttgtaattttctgaatcctttgttgtcatttcagcagtttacagcatcttcattggaagtatattccatctcaaacattctttgttcatccataagaagcaacttcttatcaagttttttcatgacattgcagtaactcagccccatcttcaggctctacttctaattctggttctcttgctacatctccctcatctgcagtgacctctccacggaagtcttgaactcctcaaagtaatccatgagggttggaatcaacttctaaactcctgttaatgttgatatattgaccccctcccatgaattatgaatgttcttaataacttctaaatggtgatacctttccagaaggctttcaatgtactttgcccggatccatcagaagactatcttggcagctgtagactaacaatatatttcttaaatgataagacttgaaagtcaaaagtactccttaatccataggctgcagaatcaatgttgtattaacaggcacgaaaacagcattaatcttgtgcatctccatcggagctcttgggtgactaggtgccttgagcagtaatattttgaaaggaggttttggttttgttttttgttttttttttttgttttttagcagtaagtctcaacactgggcttaaaatattcagtaaactatgttgtaaaaagatgtgttatcatccagactttgttgttccattactctacacaagcagggtacacttagcataattcttaagggccttggaattttcagaatggtaaatgagtatgggcttcaacttaaaatcatcaactgcattagcctgtaacaagagagtcagcctgtcctttgaagcaaggcattgacttctatctatgaaagtcttagatggcaccttgtttcaatagtaggctgtttagtacagccaccttcatcagtgatcttagctagatcttctgcataacttgctgcagcttctacatcagcacttgctgcctcaccttgtccttttatgttatagagacagctgcgcttcttaaactttataaaccaacttctgctagcttccaacttctcttctgcagcttcctcattctcttcatagaactgaagggagtcaaggccttgctctggattaagctttggcttaaggaatgttgtggctgacgtgatcttctatccagaccactaaagcgctctccatatcagcaataaggccgttttgctttcttacctttcatgtgttcactggagtaatttccttcaagaatttttcctttacattcacaacttggctaactggcatgcaaggcctagctttcagcctgtcttggcttttgacatgccttcctcacttagctcgtcatatctagcttttgatttaaagtggcaggcatacaactcttcctttcacttgaacacttagaggccactgtagggttattaattggcctaatttcaatattgttgtgttttagggaatagagaggcccagggagagggagagagcccaaacggctggttgatagagcaggcagaatgcacacaacatttatcagattatgtttgcaccatttaccagattatgggtacggtttgtggcaccccccaaaaattagaatagtaacatcaaagatcactgatcacagatcgccataacataaataataataaactttaaaatactgtgagaattaccaaaatgtgatacagagacatgaagtgagcacatgctgttgaaaaaaatgacactgatagacatacttaacacgtgggattgccacaaaccttcagtttgtaaaagtcacagtaactgtgactcacaaaagaacaaagcacaataaaacgaggtatgcctgtatttttaaaaaaagctttttgttaaaattcaggatatgtaataggtctgtaggaatagtgaaatatttttgctgatggatgtagatatatacgtggatagagatgaagatcttaattatagctatgcagcatagatttagtcaaagacatttgaaaagacaaatgttaaattagtgtggctaatgacctacccgtgccatgttttccctcttgcaatgagataccccacactgtgtagaaggatggagggaggactcctactgtccctctttgcgtgtggttattaagttgcctcactgggctaaaacaccacacatctcatagataatatttggtaagttgtaatcgtcttcactcttctcttatcacccacccctatcttcccacttttccatctttgttggtttgcaacagccccttctttttgcctgactctccaggattttctctcatcataaattgttctaaagtacatactaatatgggtctggattgactattcttatttgcaaaacagcaattaaatgttatagggaagtaggaagaaaaaggggtatccttgacaataaaccaagcaatattctgggggtgggatagagcaggaaattttatttttaatcttttaaaatccaagtaataggtaggcttccagttagctttaaatgttttttttttccagctcaaaaaattggattgtagttgatactacatataatacattctaattccctcactgtattctttgtttagtttcatttatttggtttaaaataattttttatcccatatctgaaatgtaatatatttttatccaacaaccagcatgtacatatacttaattatgtggcacattttctaatagatcagtccatcaatctactcattttaaagaaaaaaaaattttaaagtcacttttagagcccttaatgtgtagttgggggttaagctttgtggatgtagcctttatatttagtataattgaggtctaaaataataatcttctattatctcaacagagcaaattattgaaaaagatgaaggtcctttttatacccatctaggagcaggtcctaatgtggcagctattagagaaatcatggaagaaaggtaattaacgcaaaggcacagggcagattaacgtttatccttttgtatatgtcagaatttttccagccttcacacacaaagcagtaaacaattgtaaattgagtaattattagtaggcttagctattctagggttgccaacactacacactgtgctattcaccagagagtcacaatatttgacaggactaatagtctgctagctggcacaggctgcccactttgcgatggatgccagaaaacccaggcatgaacaggaatcggccagccaggctgccagccacaaggtactggcacaggctccaacgagaggtcccactctggctttcccacctgataataaagtgtcaaagcagaaagactggtaaagtgtggtataagaaaagaaccactgaattaaattcacctagtgttgcaaatgagtacttatctctaagttttcttttaccataaaaagagagcaagtgtgatatgttgaatagaaagagaaacatactatttacagctgcctttttttttttttttcgctatcaatcacaggtatacaagtacttgcctttactcctgcatgtagaagactcttatgagcgagataatgcagagaaggcctttcatataaatttatacagctctgagctgttcttcttctagggtgccttttcattaagaggtaggcagtattattattaaagtacttaggatacattggggcagctaggacatattcagtatcattcttgctccatttccaaattattcatttctaaattagcatgtagaagttcactaaataatcatctagtggcctggcagaaatagtgaatttccctaagtgccttttttttgttgtttttttgttttgttttttaaacaagcagtaggtggtgctttggtcataagggaagatatagtctatttctaggactattccatattttccatgtggctggatactaactatttgccagcctccttttctaaattgtgagacattcttggaggaacagttctaactaaaatctattatgactccccaagttttaaaatagctaaatttagtaagggaaaaaatagtttatgttttagaagactgaacttagcaaactaacctgaattttgtgctttgtgaaattttatatcgaaatgagctttcccattttcacccacatgtaatttacaaaatagttcattacaattatctgtacattttgatattgaggaaaaacaaggcttaaaaaccattatccagtttgcttggcgtagacctgtttaaaaaataataaaccgttcatttctcaggatgtggtcatagaataaagttatgctcaaatgttcaaatattt

SEQ ID NO: 260 - DNA, 1705 bp, Homo sapiens
gggggcgggacgcgccgaggagtggggcgcgagccgccggttttgattagtgcgcggagctgcggcggtggagctgctcggccgggagcccggcggcgagacggagaggcggcggaggtgcccgcgcgcagggtctggtgggcggccgcgaggctcgggagaggcgaaccggagcgcgggaccgcggtcgccccgaccagagccgggagaccgcagcacccgcagccgcccgcgagcgcgccgaagacagcgcgcaggcgagagcgcgcgggcgggggcgcgcaggccctgcccgccccttccgtccccacccccctccgccctttcctctccccaccttcctctcgcctcccgcgcccccgcaccgggcgcccaccctgtcctcctcctgcgggagcgttgtccgtgttggcggccgcagcgggccgggccggtccggcgggccgggggatggcgctgctggacctggccttggagggaatggccgtcttcgggttcgtcctcttcttggtgctgtggctgatgcatttcatggctatcatctacacccgattacacctcaacaagaaggcaactgacaaacagccttatagcaagctcccaggtgtctctcttctgaaaccactgaaaggggtagatcctaacttaatcaacaacctggaaacattctttgaattggattatcccaaatatgaagtgctcctttgtgtacaagatcatgatgatccagccattgatgtatgtaagaagcttcttggaaaatatccaaatgttgatgctagattgtttataggtggcaaaaaagttggcattaatcctaaaattaataatttaatgccaggatatgaagttgcaaagtatgatcttatatggatttgtgatagtggaataagagtaattccagatacgcttactgacatggtgaatcaaatgacagaaaaagtaggcttggttcacgggctgccttacgtagcagacagacagggctttgctgccaccttagagcaggtatattttggaacttcacatccaagatactatatctctgccaatgtaactggtttcaaatgtgtgacaggaatgtcttgtttaatgagaaaagatgtgttggatcaagcaggaggacttatagcttttgctcagtacattgccgaagattactttatggccaaagcgatagctgaccgaggttggaggtttgcaatgtccactcaagttgcaatgcaaaactctggctcatattcaatttctcagtttcaatccagaatgatcaggtggaccaaactacgaattaacatgcttcctgctacaataatttgtgagccaatttcagaatgctttgttgccagtttaattattggatgggcagcccaccatgtgttcagatgggatattatggtatttttcatgtgtcattgcctggcatggtttatatttgactacattcaactcaggggtgtccagggtggcacactgtgtttttcaaaacttgattatgcagtcgcctggttcatccgcgaatccatgacaatatacatttttttgtctgcattatgggacccaactataagctggagaactggtcgctacagattacgctgtgggggtacagcagaggaaatcctagatgtataactacagctttgtgactgtatataaaggaaaaaagagaagtattataaattatgtttatataaatgctttt

SEQ ID NO: 261 - DNA, 1747 bp, Homo sapiens
actgccaccatgctggcctcagggctgcttctggtgaccttgctggcctgcctgactgtgatggtcttgatgtcagtctggcggcagaggaagagcagggggaagctgcctccgggacccaccccattgcccttcattggaaactacctgcagctgaacacagagcagatgtacaactccctcatgaagatcagtgagcgctatggccctgtgttcaccattcacttggggccccggcgggtcgtggtgctgtgcggacatgatgccgtcaaggaggctctggtggaccaggctgaggagttcagcgggcgaggcgagcaggccaccttcgactggctcttcaaaggctatggcgtggcgttcagcaacggggagcgcgccaagcagctccggcgcttctccatcgccaccctaaggggttttggcgtgggcaagcgcggcatcgaggaacgcatccaggaggaggcgggcttcctcatcgacgccctccggggcacgcacggcgccaatatcgatcccaccttcttcctgagccgcacagtctccaatgtcatcagctccattgtctttggggaccgctttgactatgaggacaaagagttcctgtcactgttgcgcatgatgctgggaagcttccagttcacggcaacctccacggggcagctctatgagatgttctcttcggtgatgaaacacctgccaggaccacagcaacaggcctttaaggagctgcaagggctggaggacttcatcgccaagaaggtggagcacaaccagcgcacgctggatcccaattccccacgggacttcatcgactcctttctcatccgcatgcaggaggaggagaagaaccccaacacagagttctacttgaagaacctggtgatgaccaccctgaacctcttctttgcgggcactgagaccgtgagcaccaccctgcgctacggtttcctgctgctcatgaagcacccagaggtggaggccaaggtccatgaggagattgacagagtgatcggcaagaaccggcagcccaagtttgaggaccgggccaagatgccctacacagaggcagtgatccacgagatccaaagatttggagacatgctccccatgggtttggcccacagggtcaacaaggacaccaagtttcgggatttcttcctccctaagggcactgaagtgttccctatgctgggctccgtgctgagagaccccaggttcttctccaacccccgggacttcaatccccagcacttcctggataagaaggggcagtttaagaagagtgatgcttttgtgcccttttccatcggaaagcggtactgttttggagaaggcctggccagaatggagctctttctcttcttcaccaccatcatgcagaactttcgcttcaagtcccctcagtcgcctaaggatatcgacgtgtcccccaaacacgtgggctttgccacgatcccacgaaactacaccatgagcttcctgccccgctgagcgagggctgtgctggtgcagggctggtgggcggggccagggaaacggccggggcaggggcggggcttgtgggaggggcggggctaagaatgggggcagtgggggaaggaaggggagaggtggttagagggaacagaagaaacagaaggggctcagttcaccttgatgatgtccttcagagctgtgatgagaggaagggaaaccttacagtatgctacaaagagtagtaataatagcagctcttatttcctga

SEQ ID NO: 262 - DNA, 4193 bp, Homo sapiens
ccgccccccaccggggcggggcgcggcggcggcgggggcagggaaccgggcagcggtggcggtggcggtggcgcgggcggacgaggcggaggcgcccttcgccgggcagaactggttaaagtcctatggctatctgcttccctatgactcacgggcatctgcgctgcactcagcgaaggccttgcagtcggcagtctccactatgcagcagttttacgggatcccggtcaccggtgtgttggatcagacaacgatcgagtggatgaagaaaccccgatgtggtgtccctgatcacccccacttaagccgtaggcggagaaacaagcgctatgccctgactggacagaagtggaggcaaaaacacatcacctacagcattcacaactataccccaaaagtgggtgagctagacacgcggaaagctattcgccaggctttcgatgtgtggcagaaggtgaccccactgacctttgaagaggtgccataccatgagatcaaaagtgaccggaaggaggcagacatcatgatcttttttgcttctggtttccatggcgacagctccccatttgatggagaagggggattcctggcccatgcctacttccctggcccagggattggaggagacacccactttgactccgatgagccatggacgctaggaaatgccaaccatgacgggaacgacctcttcctggtggctgtgcatgagctgggccacgcgctgggactggagcactccagcgaccccagcgccatcatggcgcccttctaccagtacatggagacgcacaacttcaagctgccccaggacgatctccagggcatccagaagatctatggacccccagccgagcctctggagcccacaaggccactccctacactccccgtccgcaggatccactcaccatcggagaggaaacacgagcgccagcccaggccccctcggccgcccctcggggaccggccatccacaccaggcaccaaacccaacatctgtgacggcaacttcaacacagtggccctcttccggggcgagatgtttgtctttaaggatcgctggttctggcgtctgcgcaataaccgagtgcaggagggctaccccatgcagatcgagcagttctggaagggcctgcctgcccgcatcgacgcagcctatgaaagggccgatgggagatttgtcttcttcaaaggtgacaagtattgggtgtttaaggaggtgacggtggagcctgggtacccccacagcctgggggagctgggcagctgtttgccccgtgaaggcattgacacagctctgcgctgggaacctgtgggcaagacctactttttcaaaggcgagcggtactggcgctacagcgaggagcggcgggccacggaccctggctaccctaagcccatcaccgtgtggaagggcatcccacaggctccccaaggagccttcatcagcaaggaaggatattacacctatttctacaagggccgggactactggaagtttgacaaccagaaactgagcgtggagccaggctacccgcgcaacatcctgcgtgactggatgggctgcaaccagaaggaggtggagcggcggaaggagcggcggctgccccaggacgacgtggacatcatggtgaccatcaacgatgtgccgggctccgtgaacgccgtggccgtggtcatcccctgcatcctgtccctctgcatcctggtgctggtctacaccatcttccagttcaagaacaagacaggccctcagcctgtcacctactataagcggccagtccaggaatgggtgtgagcagcccagagccctctctatccacttggtctggccagccaggcccttcctcaccagggtctgaggggcagctctggccagtgctcaccagggccagcagggccctaggctggggtcgtacagctgaagtggtgggtgcattggcctaggctgagcgtggggcagggaattatgggggctgtgccccagggtgggtgtctggcacccagctgccagccttctgtcctgggcaaactactccctacttaagggaataggccaggctccatccggaggcagggaccatgccaggaggagcccctgtggtcacggcatcctgtggtgtccatgaggtaccacagctccactcctggctggaacccagcaccctctgtgggaagccagcactagctctcatcccccatccgggagataccaccagtcctggtccccttttgccaacacctgctggtcagatgtccccctacccccaccccactgtcctccaaggctacaggacccctgcttctgacacagtgagcaacaagcctgggtttccctgctggcagacggcagatccctcaggaaacctgctccacttgtcagggtctcttcggagacccaggatttagggtcacatgctgcaggcagggctgtggcccagctgggtctgacaaggacccagctgtcacatcgtgaatatttaaatgtcctgtcactactgtcccattttgcaaaggctgcttgaggctttaggtgaactagaggtgactgtcttggtgatgaggccagcatagcggccctcccccaggcgacaaggaccaaggtgctgctaaggccactctagcgcccagacaccccagtagctgagctctgctcctatggctacagagctggggcagaagctgaccccatttctggaggaagatccgagtttgtgaccgtcctccactcccctctattgtcactgtccccagctttgctccagtctgtcacttgcagcctggagctcagcctcaccagttaggtgaggcagagatggctgcagggccaacactggcagagcctgggagtccttcggaaggggaccagggcgtctgaagtgctcagtgcccccactactctgaggccgactccagctactctgaggccgactcaatctctcggctggaagcagtgttttcccagagcttggcccttgctgacctcgctcactgggcccatcttcccacactgctcttagaaggacacccctaccggtagcagccccaagctgagggggctccctttttgaccttcactggcccgcccttcactgtctccagcaggagttcctagggcttggcctgccttgctccacagtacggcggaggcagccctgcttgtcactgaggagccctagacaaggccaatgggttcatcaatgcccactggctctctgccaaagccaaaaaggtgtcaggcagtctccagcgtgctggccgggtctcggatgccacccctgctcactgagcctgcatgggccttgcccccgaccctgtggtctctgggattggggtcggcttaccctgtagcacagacagggactcctgctgccctgggagctgtctcaagcaaaatctcttgtcccagaggtgcccatgtgggtccgctgtgtcccctgtcatcatccttgttttttctcattttggccaagggcaggctccctgggacaggcagggaacaactgcggagatattagtgattcataggtttgtacagtgttttatactttgcaaagcactttattagctcacacctgtccactcacatgaaactcgtgttaggccctgggaggccgacggtaactctcaccgtgccctcagatgaagcacagagaggttgttacttgcccgggccatccagtgggctggctgggtcttgtgtccccatctgtggacccctctagggtctgagatgagatgagaagtgtctcctgtatccacctcttcctggcctcccttcccccacttcctggtccctgtccactcctcaggttggtgctctcacttcttgaaagctctaggcacccccgcctcccgccaggctccccattggctcctggcaggccagctgagaatgaacaggagatggaggcaggcagcccaggctgcagaggtgagggatgtggggccaggcccagagggctcagcctagaggcttccaatctcagattctcctgcctgtggtcatctgtttgtccatcaccccaggacagggcagacagaggggcaaagcactgggggccccagagcctagcttcccctcagcctgggggacatcacagcatttcagtgtcagtcacattttaaactgatcagcctttgtataatgttttttaaatcatttctaaataaaacagaaatacagagtg

SEQ ID NO: 263 - DNA, 4558 bp, Homo sapiens
cggccgcggcccggactccgcggtgggcgagcgccctgtgaggtgaccatggaggctggtggcctccccttggagctgtggcgcatgatcttagcctacttgcaccttcccgacctgggccgctgcagcctggtatgcagggcctggtatgaactgatcctcagtctcgacagcacccgctggcggcagctgtgtctgggttgcaccgagtgccgccatcccaattggcccaaccagccagatgtggagcctgagtcttggagagaagccttcaagcagcattaccttgcatccaagacatggaccaagaatgccttggacttggagtcttccatctgcttttctctattccgccggaggagggaacgacgtaccctgagtgttgggccaggccgtgagtttgacagcctgggcagtgccttggccatggccagcctgtatgaccgaattgtgctcttcccaggtgtgtacgaagagcaaggtgaaatcatcttgaaggtgcctgtggagattgtagggcaggggaagttgggtgaagtggccctgctggccagcattgatcagcactgctcaaccacacgcctgtgcaacctcgtcttcacgccagcctggttctcacccatcatgtataagacaacatcaggtcacgtccagtttgacaactgcaactttgagaacgggcacatccaggtccatggcccgggtacttgccaagtgaagttctgtaccttcaaaaacacccatatcttcctgcacaacgtgcccctgtgtgtcctggaaaactgtgaatttgtgggcagtgaaaacaactctgtgactgttgagggtcacccatctgcagataagaactgggcctacaagtatctactagggcttatcaagtcctcacccacttttctccccacagaggactctgactttttaatgtccctggacctagagagccgggaccaggcctggagcccaaagacctgtgacattgttatcgagggcagccagagccctaccagcccagcctctagctccccaaagccaggctccaaggctggctcacaggaggcagaggtgggtagtgatggtgaaagggtggcccagaccccggacagcagcgatggaggcctgagtcccagcggtgaggatgaagatgaggaccagctgatgtacagactatcctaccaagtgcagggcccacgccctgtattggggggctcatttctgggcccacctctaccaggagcatccattcagctgcccagctgcctagtgctgaactcactgcagcaggagctgcagaaggataaggaggccatggcactggccaactccgtgcagggctgcctcatccgcaagtgcctcttccgggacgggaagggaggcgtcttcgtctgctcccacggcagagccaagatggaaggaaacatcttccggaacctgacttacgcagtgcggtgtatacataatagcaagatcatcatgctcaggaacgacatttaccgctgccgagcgtcaggcatctttcttcgcttggagggcggtggcttgattgccggcaacaacatttaccacaatgcagaggctggtgtagacatccggaaaaagtccaacccactctgtaaccagatccaccatggccttcgctctggcattgtcgtccttggcaatgggaaaggcatcatccggaacaatcaaatcttttccaataaggaggctggcatttacatcctgtaccacggaaaccccgttgtgagcgggaaccacatcttcaagggccgtgctgccggcatagcagtgaatgagaacggcaaaggcctcatcacagaaaatgtcatccgtgagaatcagtggggaggtgtggacatccgccgtggagggatccccgttctcaggagtaacctcatctgctttggctattcagatggtgtggttgtgggagacgaaggcaaaggcctcatagaaggaaataccatctacgctaacaagggctgtggtgtgtggatgatgtcgtccagcctcccccatgtcaccagcaaccacgtcagctacaatggcctgtatggagtggcagtatttagccagaaggatggctccagcgagttacctcgaggccacagggctcaagagaacttcagcgaggatggggacgccatcctctgggagacagagctggagaaggaggacgacccactgcgccggcccatcaccatagctcttgttgagtctaacagtattaatcacaatggagcctcaggactctatgtccagagcagcgaggcactgcatgtcatcaccaatgtgatccacgcgaatggggacagaggcattactgtggcccagagcagccaacccacccgagtggccaacaacagcatctcctgcaaccggcaaagtggggtcaaggttgaggcccagtgcaaagtggagctccggggcaatggtatctatgacaacagaggccacggcattatcaccaagggcgacagcaccatcgtcattgaaaacgatatcattggcaaccggggcagcgggctgcagctgctgcccaggtccgacactaaagtaataaagaaccggatccactcgttccgggcctacggcatcgccgtgcggggccgtgccaaggccctggtgcaggaaaacatcatcttccagggcaaaaccagtaagaccatctttcagcagatctcaaacaaccgagaatgcatcatgcaaaacaacaagttcctggtcttcaagaaaaagtctgatacgtggcgcctggtgaacccaccagcacggccccaccttgaaaattctctcagacgtccctcggcagcccacaatgggcagaaggtgacagccatggcaacgaggatcacagcccgggtggaaggtggttaccacagcaaccgcagtgtcttctgcaccatcctgtgaggacacagacctgcttcagggccaagcctggatgggtgctcagaggagctaaggtggaaatactgcctgaaaagactccgcccctccccctccccctcgaacaaatgggtcccgggcctccaaaacacggtacctccagaacacttcagctccacagcccatagcaagaagaaagtgggcaatgtttttcagggagaagggatagaagctggtgggtttccagtcactcgaagtctataaagattgtgaagagcgggggaagctcaaatgctgaagcttttggtcaggattttctctgagttctaaggaactgtgttttacacacaccaaacccagactcttctcaggaaagagcagatttacttctgatggcgggaagtgattctagtgaggtggagagagacaactgctccagaattttcccctttgctagagctgtctccctctcaatccctccagggaccccaccacaccctcccagctgtctctggaggctggaggagttgagtttggttgacttgaggacttggacatggacctgggaggaaggaaggacctgggagcaacaggagaccccatggaaaggctgccccagggatgacaagagggacatgctgaaacaggtggggctgcagcgtgcaggcagatgctaggctgggtgggcagggatgcacaaggctctactccatccccagagagctcccaaatgcagaaggattcaaaccccatgtgagcgtgcccacaccagccgcccctcctgagcatcagcctgttcagatgagggtacctgggcctctcgttcgcatctgtgttctcatggatgagcgctggtctttactgaccctcccaagcctccccactctgtgccttggctcatgctctttcctcctcccggcatgcccttctcccccatctccgtgtcctcgttcctcaaggtttagccgagacactgccacctccacatagctctccctgccctctttccccctctgggcctcagtggcctttctctgctccctctcagggtactgagcactttctgccttgtcctggagctatctgggtccattgcctgaccccccactcacctgtgtgctccccgtaggtagggccacttctgactgtgtgtccccagatccagcctggggttggggtaggattagtggcctgagtgaggagaggaaggccagctcccagaggactttactgaaccgtactgtgaatatgtccaagtcccaaagccaggtgaggtcagaccccactgcctgaggaagagggctggatgcagggccagctcaacctgaacaatcccctcccactcggcctttcctgtggggccttcaccagcctgctggggtcactgtcgtgcacttggctgcgtggctggttctattggccctaggtgctgctctgttgggtgggatgggagggggtagagggagccaggagcactgggttctccctgagaacactgggcacaagagtactggcctcttctatccctggcactgtcctttgcacttgtttggtggccccaatgtgagtcgctgtaaaaaatgctgccgttactattttctaagaaatgacttttctgtgaaccaacagtaacaaaaacctcagtaaccaaaataaagttctatatttt

SEQ ID NO: 264 - DNA, 1300 bp, Homo sapiens
acgggtcgagtgctggcttccggcggaaaagcgcgcgagcaagatggccaccaccaagcgcgtcttgtacgtgggtggactggcagaggaagtggacgacaaagttcttcatgctgcgttcattccttttggagacatcacagatattcagattcctctggattatgaaacagaaaagcaccgaggatttgcttttgttgaatttgagttggcagaggatgctgcagcagctatcgacaacatgaatgaatctgagctttttggacgtacaattcgtgtcaatttggccaaaccaatgagaattaaggaaggctcttccaggccagtttggtcagatgatgactggttgaagaagttttctgggaagacgcttgaagagaataaagaggaagaagggtcagagcctcccaaagcagagacccaggagggagagcccattgctaaaaaggcccgctcaaatcctcaggtgtacatggacatcaagattgggaacaagccggctggccgcatccagatgctcctgcgttctgatgtcgtgcccatgacagcagagaatttccgctgcctgtgcactcatgaaaagggctttggctttaagggaagcagcttccaccgcatcatcccccagttcatgtgccagggcggtgatttcacaaaccacaatggcactgggggcaagtccatctatgggaagaagttcgatgatgaaaactttatcctcaagcatacgggaccaggtctactatccatggccaactctggcccaaacaccaatggctctcagttcttcctgacatgtgacaagacagactggctggatggcaagcatgtggtgtttggagaggtcaccgaaggcctagatgtcttgcggcaaattgaggcccagggcagcaaggacgggaagccaaagcagaaggtgatcatcgccgactgtggggagtacgtgtgaggcggcactctctctgcttccccctccgctcttgaccctgcatatccaggaaggaactgccagcctcagaggaggcagcaccgagggtgcctgtttgaagcaagcagcatttgggatatgtgcccttcctcagggtctgcttggagcagctcctctgcaggcacagcctggactattcccaggcacagctgtgggcccaggagccagctcaggtgctcccctccaccatgggcaggctgtgcaaaaagccactggcttttctcagcatttgctgctgggcctctcctgggactaccagtgtggctcttacgtgttttctttgctaaaataaaccctagttcttatattgct

SEQ ID NO: 265 - DNA, 5814 bp, Homo sapiens
ggaggagccgcgggcgcggcgccgcgctgtccccggccgccgcccgccccactccgcaccgcatgtaaacagtcccagccggcccagcccggccccggaggagcccgcgcaggccgagccgagcgccgcgctgcccgcccgggaggagggcgcctaggagcgggagggcgggcggcggcgggaggcgggcgcggggccgcgatggatttccagcagctggccgacgttgcggagaaatggtgctccaacacgcccttcgagctcatcgccaccgaggagaccgaacgcaggatggatttctacgccgaccccggcgtctccttctatgtgctgtgtccggacaacggctgcggcgacaattttcacgtgtggagtgagagcgaggactgcctgcctttcttgcagctagcacaggattacatctcctcctgcggcaagaagacgctccacgaagtcctggaaaaagtcttcaagtctttcagacctttactggggcttccggatgcagatgacgatgcgtttgaagagtacagtgctgacgtggaagaagaggagccagaggcggaccacccccagatgggggtcagccagcagtaaatctgggggctcccctgagaaggagagtgagccccacagtaacctaggtggggtcactgcccctcctgggttagcattttgcattagcacttcgaaataggacatctggctcccagcatccaaattaaaatgaaatacctttttaacgaccacaaaatatctgtgatgagctttgctcagaagtgacctgaatttcactcccgcttcagtggggtttctatggagttgtcttggtagcctttgccattttgaatttagagtccattttgtggctgactattctcttaagtttatgttggagaattaacattcgctgactcgaatgtagagaactctgaatgtattaaggataggttttgagtcctcacaggtgaccttactgagggaaagcatggcagagaagaaatgcagtctgcactttttatgtactttttaagtgtccgtaagtgaaaggttttgcttataaagcatgaattttaatatctagtcattaaactgcacaagtgcaaatacaagggcaggaaaggataatcacttagctttggactaagagggtaagagaggcccagaagcctttaagtgttttgccattactgagttacctgggtatgtagcgactggttcgtggttaggtgtaaatgttacttgcttgttcgactgtttcaaaacatgctaattccaaagccacttttgaagtctatagtggaaaatatagatggggtgaaagatataatgtattgatttttaaagctgtttataagccgtcccacgtataaaatgaaacattttaccttctctctttctaatgagatggccgcttgttaaatcatgaaaacatccagaattcaagtgccgcttaaactttgaagccatagataaatttgttagaaaagtaaaccaggattaaaagtttttaaaaatatggtagaatccttctttactttttaagtcttttatttaaaaaaaaaaagtcaaaaaaaggattccattgtgtaatttatttaaaaatttaatcacatgtttcgagggacttaattgtggtgtatttgtaaagggacacgaaggtaggaatcttttaatcgtgggttagcttggttaacagggaacgttttaataatcaagatactcagacaactcacagaaacaacttctgtaataactggaaatactgctgttatcgtttagccaacaattacttactggggacatcctttgtaatgctaacatggaattattcctggacccttctgcatccctggttttagttaacctaggatgcggaatgcctcctttacaacactagattaaacctagcatctggggtgggtacgtttaaacagtcacacatgtgcctgttaggttgtgaaagttttgaattaaaaacaagcagtagcagcagaggccacagaacttatgggagtcttgtatatcttccaggcatgtcggtgtaaacctgattgtctcgacattttctgtttaattgattggtgctgtgaggagttcggctgctcgtggtaaaacagcgtactccagttttaagtcatcgggtaaaataataggacagtgatttccatctgtgcttcagtacccactttgtgttcttttcttgaaaagtcatactaaaggttaatttcaagtaaaatgaatttccttccaagtagcctattagtaaaacacaacttagtgtttcatccattggggtgagcatatactgccctttgcagccctgcctgtgttctgattggctccattcatgagcaaaggtgattgtgagctgtatattacacaggtgtcgcccaggtttcgtaacctccactttaatgcagtaagccgcaagaatgacttctgcaagtgaaatgaggaagcttcactagcttgctccattggaaggtaaactgaaattttatacgttgaagcttaaaatctaaatttatgtatgtttggaaatggaatggacattaacataaaatgtattttatcaaaaaagtgtttagactttgaccaaatacatgttggtattatcatgttaatgttctctgtttataaaaattgagtggagatagatagactcggccattctgtgggctgatgagaattctgggctttgttttgcaccaggggtaggaaacagagaacatgtctgtatgttacttaatctccatagcaaaatcccaaacagcattagcagatcgaattgtttcttctaagacttcctttttctgaatgtgtgcacatcccttctcgtgctcacacacttgcccacacactcacttcttcctgcgctgtggctgctctaagcagggctgtgcatggtgcaaagctgcagtcagtgagcctggcagcctgtggtttctgttatggaaatggttccatggtgaaacacatccctgacccttcacagacttacacatttactcaccaggaggtggcagcggtgtgggaggaggagtgttgaccttggacgcaggagagacacctgggttctagttcaagtcggccaaggactgtgtgaccttgacaagtctaactggtctgtgaacaaggggcatttgcccttccagctgtaaacactgcccttctgtgcctgccttatgtgtgtgtgtgagtaaggagcaacagtcaaggaaacttttagggattcgagaagaaaatacatgtgggatcttgccaaggtgctgcctttaggatgctgacccctgcactaccttagaacatgttgatctgtgagtgcccaagcccctgagggctcgatctcatggggcagatgaaattctcttccttagaggaaagggaaaggtgaggccccagaggacttatctcagctgtacatgctctgcctgtggagacatggcttttctttgtgctgtggcagactggggctttggaagtggtgtatgtttaacttacctgagagtgagagatgtgtaggaagaatagctggaagaaagtgaaagatgagtgccagtacttttggcctgttatccagtagagagaaagtgacagtgaaagtaacgtgagagagaaagagtgtgtgtgtatatgtgagagagagaaagaaagagaaaggaatgcttgattgcttgttgttcactgggccagctctgaaatccaaaatcatgccttgataacattacaaaaccgtgatcctgggtttgagtgaatcctagagacattgttcttatggccgcctggtttccgcagcctgatcaccatatcgagcagacgtcaaggaatcagagtgaagtacggagccagggagggaggtgaggccccgtgtagtgcctgtcaccactgtggattcacctgcactcaggtgtccactcctgtctcccaggcccaaagcagcacatggtgcaatggaaaagtctcttatgtagggatcctccttgtgtcctggtgccagaattagatttccagtgtacttcaacgaaaacctctctcctttatagttgctgtcatctttcatgtataaacagaaaccgtctctagcacaatatatttctgaatattgtttctgtttcataagagcacaatgtacatggacctaggggagctgtggtcccaagtgtcattggaatttatattttaggaataggctttgcatgttaaaattcacaagttgggaaactggtatgaacagatctgatttcttacagagaggcatgaaggaataggcaggacttaacttggggtgggaggagatgaataagggagaatgggagagttggggtctgacagttaccacctgagccccaggaaaactgttttcattttcacggctgtctcactgggggcctgctttcctcaaaggaactgactgtatgttgagaggcaatgccttgtgttggcatggctttgccactttaaaagtgccccccagccaaggagaccaacaggaaccctgctcatctggtagggctctttccttcagtaaaaccagctgccagcctgagaagcctgtctttcccaaatgcaggcagatctgagaggggctccaggcacccggcaggtaaatcacaaagcaaacttgggtgtccttggcagcggggaggaagcaggagtgccccctcaggccagagggcagggccaacctcctcactgtgcttcaaggttgtagaaagagcacaattaatgcttaagcgatcacagacccctctcccctgcagtgggtgttagctccaaagagatgccattgctgatcacccagtcttcggagaagcctaaaatttctttgaattaaaaactgatcctttttcataaagacccagtcacttctcccagtttagtgataacaggtatgacacaagaagctgaagtcttttagattttatagagagtaattctgaaacctgccagaatgctggtagcctgtggtgtccatggcaatgggtgtccatggtaaaatatctatagcttctgctcactgggcaaatataaaagacaacatattatttaacataatatgttgtcttttatatttttatttaaatctggattacgaaaatatagtacccatgagcatttcatgttagaaaccccatttaaagcactataaggctgaataggcacaagcgattaaaagtagatgccaggccacataaaaataaatgttttaatttacttagagctgtattcaagttgtttgataccagacagaaagctgacagtctgttctttgtaaactgcctttccctgtttttctgttttgttttgtttctcaagtttcattttttactaagccccttctgacacctaggcagataaagataagagtagtgcgcagtacaaatgtcagctctgaagaggaggaagtaaatcttcaatgctagggcagatcttcactatccgtgatccagtcttaatttgagcatgagagcaaaatttagtcatctacacaagaagcaaaagcaaggaatagttgttgggtttttgttttttggttgttgtttttttttttttttaggcaagaagtgttgccggtagggtatgtgtgctttctttgccttcctatttcctttcaaagaaatctcttgtaaattacaaaactgtgaattgggttgccaaaaactgttgcccttcgttagatgcttcaaacagtgtaaatcctatactgcaccctgtccacctctgctccctcctccctcccctgagagtgaggacctcatccgaccatgtaattaccattcgcttgctattaaagagcctttcaaactctgg

SEQ ID NO: 266 - DNA, 690 bp, Homo sapiens
gacgcccagtgacctgccgaggtcggcagcacagagctctggagatgaagaccctgttcctgggtgtcacgctcggcctggccgctgccctgtccttcaccctggaggaggaggatatcacagggacctggtacgtgaaggccatggtggtcgataaggactttccggaggacaggaggcccaggaaggtgtccccagtgaaggtgacagccctgggcggtgggaagttggaagccacgttcaccttcatgagggaggataggtgcatccagaagaaaatcctgatgcggaagacggaggagcctggcaaatacagcgcctatgggggcaggaagctcatgtacctgcaggagctgcccaggagggaccactacatcttttactgcaaagaccagcaccatgggggcctgctccacatgggaaagcttgtgggtaggaattctgataccaaccgggaggccctggaagaatttaagaaattggtgcagcgcaagggactctcggaggaggacattttcacgcccctgcagacgggaagctgcgttcccgaacactaggcagcccccgggtctgcacctccagagcccaccctaccaccagacacagagcctggaccacctggacctaccctccagccatgacccttccctgctcccacccacctgactccaaataaagtccttctccccc

SEQ ID NO: 267 - DNA, 9146 bp, Homo sapiens
ccctggagggagagagagccagagagcggccgagcgcctaggaggcccgccgagcctcgccgagccccgccagccccggcgcgagagaagttggagaggagagcagcgcagcgcagcgagtcccgtggtcgcgccccaacagcgcccgacagcccccgatagcccaaaccgcggccctagccccggccgcacccccagcccgcgccagcatgatgaacaacagcggctactcagacgccggcctcggcctgggcgatgagacagacgagatgccgtccacggagaaggacctggcggaggacgcgccgtggaagaagatccagcagaacacattcacgcgctggtgcaatgagcacctcaagtgcgtgggcaagcgcctgaccgacctgcagcgcgacctcagcgacgggctccggctcatcgcgctgctcgaggtgctcagccagaagcgcatgtaccgcaagttccatccgcgccccaacttccgccaaatgaagctggagaacgtgtccgtggccctcgagttcctcgagcgcgagcacatcaagctcgtgtccatagacagcaaggccatcgtggatgggaacctgaagctgatcctgggcctgatctggacgctgatcctgcactactccatctccatgcccatgtgggaggatgaagatgatgaggatgcccgcaaacagacgcccaagcagcggctgcttggctggatccagaacaaggtgccccagctgcccatcaccaacttcaaccgtgactggcaggacggcaaagctctgggcgccctggtggacaactgcgcccccggtctctgccccgactgggaggcctgggaccccaaccagcccgtggagaacgcccgggaggccatgcagcaggccgacgactggcttggggtgccccaggtcattgcccctgaggagattgtggaccccaacgtggatgagcattctgttatgacctacctgtcccagttccccaaggccaagctcaaacctggtgcccctgttcgatccaagcagctgaaccccaagaaagccatcgcctatgggcctggcatcgagccacagggcaacaccgtgctgcagcctgcccacttcaccgtgcagacggtggacgcgggcgtgggcgaggtgctggtctacatcgaggaccctgaaggccacaccgaggaggctaaggtggttcccaacaatgacaaggatcgcacctatgctgtctcctatgtgcccaaggtcgctgggttacacaaggtgaccgtgctctttgctggccagaacattgaacgcagtccctttgaggtgaacgtgggcatggccctgggagatgccaacaaggtgtcagcccgtggccctggcctggaacctgtgggcaatgtggccaacaaacccacctactttgacatctacactgcgggggccggcactggcgatgttgctgtggtgatcgtggacccacagggccggcgggacacagtggaggtggccctggaggacaagggtgacagcacgttccgctgcacatacagacctgccatggaggggccacataccgtgcatgtggcctttgcgggtgcccccatcacccgcagtcccttccctgtccatgtgtcggaagcctgtaaccccaacgcctgccgcgcctctgggcgaggcctgcagcccaagggtgttcgcgtgaaagaggtggctgacttcaaggtgtttaccaagggtgccggcagcggggagctcaaggtcacggtcaaggggccaaagggcacagaggagccagtgaaggtgcgggaggctggggatggtgtgttcgagtgcgagtactacccggtggtgcctgggaagtatgtggtgaccatcacgtggggcggctacgccatccctcgcagcccctttgaggtacaggtgagcccagaggcaggagtgcaaaaggtccgggcctggggtcctggtttggagactggccaggtgggcaagtcagccgattttgtggtggaagccattggcaccgaggtggggacactgggcttctccatcgaggggccctcacaagccaagatcgaatgtgacgacaagggggatggctcctgcgatgtgcggtactggcccacggagcctggggagtacgctgtgcacgtcatctgtgacgatgaggacatccgagactcacccttcattgcccacatcctgcccgccccacctgactgcttcccagataaggtgaaggcctttgggcctggcctggagcctaccggctgcatcgtggacaagcccgctgagttcaccattgatgctcgtgcagctggcaagggagacctgaagctctatgcccaggacgccgacggctgtcccatcgacatcaaggtgatccccaacggcgacggcaccttccgctgctcctacgtgcccaccaagcccattaagcacaccatcatcatctcctggggaggcgtaaacgtgcccaagagccccttccgggtgaacgtgggcgagggcagccaccccgagcgggtaaaggtgtacggccccggagtggagaagacaggcctcaaggccaatgagcccacctacttcacggtggactgcagcgaggcggggcaaggcgacgtgagcatcggcatcaagtgcgccccaggcgtggtgggccctgcagaggctgacattgacttcgacatcatcaagaatgacaacgacaccttcaccgtcaagtacacgccaccaggggcgggccgctacaccatcatggtgctgtttgccaaccaggagatccccgccagccccttccacatcaaggtggacccatcccacgatgccagcaaagtcaaggccgagggccctgggctgaatcgcacaggtgtggaagtcgggaagcccacccacttcacggtgctgaccaagggagccggcaaggccaagctggatgtgcagtttgcagggacagccaagggcgaggttgtgcgggactttgagatcatagacaaccatgactactcctacactgtcaagtacaccgctgtccagcagggcaacatggcagtgacagtgacttatggcggggaccctgtccccaagagcccctttgtggtgaatgtggcacccccgctggacctcagcaaaatcaaagttcagggccttaatagcaaggtggctgtgggacaggaacaagcattctctgtgaacacacgaggggctggcggtcagggccaactggatgtgcggatgacttcgccctctcgccggcccatcccctgcaagctggagccaggcggtggagcggaagcccaggctgtgcgctacatgcccccggaggaggggccctacaaggtggatatcacctacgatggtcacccggtgcctggcagcccgtttgctgtggagggtgtcctgccccctgatccctccaaggtctgtgcttatggcccgggtctcaagggtggactggtaggcacccccgcgccattctccatcgacaccaagggggctggcacaggtggcctggggctgaccgtagagggcccctgcgaggccaagatcgagtgccaggacaatggtgatggctcatgtgctgtcagctacctgcccacggagcctggcgagtacaccatcaacatcctgtttgctgaggcccacatccctggctcgcccttcaaagccaccattcggcctgtgtttgacccgagcaaggtgcgggccagtggaccgggcctggagcgcggcaaggtcggtgaggcagccaccttcactgtggactgctcagaggcaggcgaggcggagctgaccattgagatcctgtcggatgccggggtcaaggccgaggtgctgatccacaacaacgcggatggcacctaccacatcacctacagccctgccttccctggcacctacaccattaccatcaagtatggcgggcatcccgtgcccaaattccccacccgtgtccatgtgcagcctgcggtcgataccagtggcgtcaaggtctcagggcctggtgttgagccacacggtgtcctgcgggaggtgaccactgagttcactgtggatgcaagatccctaacagccacaggcggcaaccacgtgacggctcgtgtgctcaacccctcgggggccaagacagacacctatgtgacagacaatggggacggcacctaccgagtgcagtacaccgcctacgaggagggcgtgcatctggtggaggtcctgtatgatgaggtcgctgtgcccaagagccccttccgagtgggcgtgaccgagggctgtgatcccacccgcgtccgagccttcgggccaggcctggagggtggcttggtcaacaaggccaaccgattcactgtggagaccaggggagcgggcaccgggggccttggcctagccatcgagggtccctcggaagccaagatgtcctgcaaggacaacaaggatggtagctgcaccgtggagtacatccccttcactcctggagactatgacgtcaacatcaccttcggggggcggcccatcccagggagcccgttccgcgtgccagtgaaggatgtggtggaccctgggaaggtgaagtgctcagggccagggctgggggctggtgtcagggcccgggttcctcagaccttcacagtggattgcagtcaagctggccgggcgcccctgcaggtggctgtgctgggccccacaggtgtggccgagcctgtggaggtgcgggacaatggagatggcacccacactgtccactacaccccagccactgacgggccctacacggtagccgtcaagtatgctgaccaggaggtgccacgcagccccttcaagatcaaggtcctcccagctcatgatgccagcaaggtgcgggccagcggcccaggcctcaacgcctctggcatccctgccagcctgcctgtggagttcaccatcgacgcacgggacgcgggcgaggggttgctcactgtccagatcttggaccccgagggtaagcccaagaaggccaacatccgggacaatggggatggcacgtacactgtgtcctacctgccggacatgagtggccggtacaccatcaccatcaagtatggcggtgatgagatcccctactcgcccttccgcatccatgctctgcccactggggatgccagcaagtgcctcgtcacagtgtccattggaggccatggcctgggtgcctgcctgggccctcgaatccagattgggcaggagacggtgatcacggtggatgccaaggcagccggtgaggggaaggtgacatgcacggtgtccacgccggatggggcagagctcgatgtggatgtggttgagaaccatgacggtacctttgacatctactacacagcgcccgagccgggcaagtacgtcatcaccatccgcttcgggggtgagcacatccccaacagccccttccacgtgctggcgtgtgaccccctgccgcacgaggaggagccctctgaagtgccacagctgcgccagccctacgctcctccccggcccggcgcccgccccacacactgggccacagaggagccagtggtgcctgtggagccaatggagtccatgctgaggcccttcaacctggtcatccccttcgcggtgcagaaaggggagctcacaggagaggtgcggatgccctcggggaagacggcacggcccaacatcaccgacaacaaggacggcaccatcacggtgaggtatgcacccactgagaaaggcctgcaccagatggggatcaagtatgacggcaaccacatccctgggagccccttacagttctatgtggatgccatcaacagccgccatgtcagtgcctatgggccaggcctgagccatggcatggtcaacaagccagccaccttcactattgtcaccaaagatgctggagaagggggtctgtcactggccgtggagggcccatccaaggcagagatcacctgtaaggacaacaaggatggcacctgcaccgtgtcctatctgccgactgcgcctggagactacagcatcatcgtgcgcttcgatgacaagcacatcccggggagccccttcacagccaagatcacaggtgatgactccatgaggacctcacagctgaatgtgggcacctccacggacgtgtcactgaagatcaccgagagtgatctgagccagctgaccgccagcatccgtgccccctcgggcaacgaggagccctgcctgctgaagcgcctgcccaaccggcacattgggatctccttcacccccaaggaggtcggggagcacgtggtgagcgtgcgcaagagtggcaagcatgtcaccaacagccccttcaagatcctggtggggccatctgagatcggggacgccagcaaggtgcgggtctggggcaaggggctttccgagggacacacattccaggtggcagagttcatcgtggacactcgcaatgcaggttatgggggcttggggctgagtattgaaggcccaagcaaggtggacatcaactgtgaggacatggaggacgggacatgcaaagtcacctactgccccaccgagcccggcacctacatcatcaacatcaagtttgctgacaagcacgtgcctggaagccccttcactgtgaaggtgaccggcgagggccgcatgaaggagagcatcacccggcggagacaggcaccttccatcgccaccatcggcagcacctgtgacctcaacctcaagatcccaggaaactggttccagatggtgtctgcccaggagcgcctgacacgcaccttcacacgcagcagccacacctacacccgcacggagcgcacggagatcagcaagacgcggggcggggagacaaagcgcgaggtgcgggtggaggagtccacccaggtcggcggggaccccttccctgctgtgtttggggacttcctgggccgggagcgcctgggatccttcggcagcatcacccggcagcaggagggtgaggccagctctcaggacatgactgcacaggtgaccagcccatcgggcaaggtggaagccgcagagatcgtcgagggcgaggacagcgcctacagcgtgcgctttgtgccccaggaaatggggccccatacggtcgctgtcaagtaccgtggccagcacgtgcccggcagcccctttcagttcactgtggggccgctgggtgaaggtggtgcccacaaggtgcgggccggaggcacagggctggagcgaggtgtggccggcgtgccagccgagttcagcatctggacccgggaggctggcgctgggggcctgtccattgctgtggagggtcctagcaaagcggagattgcatttgaggatcgcaaagatggctcctgcggcgtctcctatgtcgtccaggaaccaggtgactatgaggtctccatcaagttcaatgatgagcacatcccagacagcccctttgtggtgcctgtggcctccctctcggatgacgctcgccgtctcactgtcaccagcctccaggagacggggctcaaggtgaaccagccagcgtcctttgccgtgcagctgaacggtgcccggggcgtgattgatgcccgggtgcacacaccctcgggggctgtggaggagtgctacgtctctgagctggacagtgacaagcacaccatccgcttcatcccccacgagaatggcgtccactccatcgatgtcaagttcaacggtgcccacatccctggaagtcccttcaagatccgcgttggggagcagagccaggctggggacccaggcttggtgtcagcctacggtcctgggctcgagggaggcactaccggtgtgtcatcagagttcatcgtgaacaccctgaatgccggctcgggggccttgtctgtcaccattgatggcccctccaaggtgcagctggactgtcgggagtgtcctgagggccatgtggtcacttatactcccatggcccctggcaactacctcattgccatcaagtacggtggcccccagcacatcgtgggcagccccttcaaggccaaggtcactggtccgaggctgtccggaggccacagccttcacgaaacatccacggttctggtggagactgtgaccaagtcctcctcaagccggggctccagctacagctccatccccaagttctcctcagatgccagcaaggtggtgactcggggccctgggctgtcccaggccttcgtgggccagaagaactccttcaccgtggactgcagcaaagcaggcaccaacatgatgatggtgggcgtgcacggccccaagaccccctgtgaggaggtgtacgtgaagcacatggggaaccgggtgtacaatgtcacctacactgtcaaggagaaaggggactacatcctcattgtcaagtggggtgacgaaagtgtccctggaagccccttcaaagtcaaggtcccttgaatcccaaaagtgcctccccagcctcagcccccacctccagccacacacacattacacacacacacacacacacacaaatgtgccacacccagacacgcacagaatcagacactacaaacacctgccttgggggtgaagtgaaggcccagcctccccaccccaccgcgccccaggggttggaggaccttgtctgtgtcaggacagtgtccctccctgggaatgtgacatgagggccgactggggccaggctcaggggcagaggctgggacacaaggggctggcgagggctgcgaggccagggaagccctgagtttctggcggggctgagcagtgggggagcattgtgttgtgggtgtctgtgtgtgaggtcaccctcaaactgcaccgccggccagataccctcctgaccccgaggacttggtctggtctctctggtggctacaaccccagagttttaaggacttggaaaggaaagcacaatcagagaagaaaacagcccccgaaccagcaggagtggcctggcacatggaccggcctgagcgatgtgcactccacccaagccaggctcccagggggcctgatttctctctcactgtctctttttttaaaatggttgcacggctctgccccatggggggccttttttacacactgcgaggcccagctttctaggggacttttgcacatgtcatgcagctcagctgggagctgcttaggtggaaaactccaaataaagtgcggctgtcgcagagggttggc

SEQ ID NO: 268 - DNA, 1100 bp, Homo sapiens
gtccttagccggtagcttccgggtttcctgggctactacgatggcgatgagtttcgagtggccgtggcagtatcgcttcccacccttctttacgttacaaccgaatgtggacactcggcagaagcagctggccgcctggtgctcgctggtcctgtccttctgccgcctgcacaaacagtccagcatgacggtgatggaagctcaggagagcccgctcttcaacaacgtcaagctacagcgaaagcttcctgtggagtcgatccagattgtattagaggaactgaggaagaaagggaacctcgagtggttggataagagcaagtccagcttcctgatcatgtggcggaggccagaagaatgggggaaactcatctatcagtgggtttccaggagtggccagaacaactccgtctttaccctgtatgaactgactaatggggaagacacagaggatgaggagttccacgggctggatgaagccactctactgcgggctctgcaggccctacagcaggagcacaaggccgagatcatcactgtcagcgatggccgaggcgtcaagttcttctagcagggacctgtctccctttacttcttacctcccacctttccagggctttcaaaaggagacagacccagtgtcccccaaagactggatctgtgactccaccagactcaaaaggactccagtcctgaaggctgggacctggggatgggtttctcacaccccatatgtctgtcccttggatagggtgaggctgaagcaccagggagaaaatatgtgcttcttctcgccctacctcctttcccatcctagactgtccttgagccagggtctgtaaacctgacactttatatgtgttcacacatgtaagtacatacacacatgcgcctgcagcacatgcttctgtctcctcctcctcccacccctttagctgctgttgcctcccttctcaggctggtgctggatccttcctaggggatgggggaagccctggctgcaggcagccttccaggcaatatgaagataggaggcccacgggcctggcagtgagaggtgtggccccacaccgatttatgatattaaaatctcaactccc

SEQ ID NO: 269 - DNA, 2041 bp, Homo sapiens
cctttgtcattctagctgcctgctgcctccgcagcgtccccccagctctccctgtgctaactgcctgcaccttggacagagcgggtgcgcaaatcagaaggattagttgggacctgccttggcgaccccatggcatcccccagaaccgtaactattgtggccctctcagtggccctgggactcttctttgttttcatggggactatcaagctgacccccaggctcagcaaggatgcctacagtgagatgaaacgtgcttacaagagctatgttcgagccctccctctgctgaagaaaatggggatcaattccattctcctccgaaaaagcattggtgcccttgaagtggcctgtggcatcgtcatgacccttgtgcctgggcgtcccaaagatgtggccaacttcttcctactgttgctggtgttggctgtgctcttcttccaccagctggtcggtgatcctctcaaacgctacgcccatgctctggtgtttggaatcctgctcacttgccgcctgctgattgctcgcaagcccgaagaccggtcttctgagaagaagcctttgccagggaatgctgaggagcaaccctccttatatgagaaggcccctcagggcaaagtgaaggtgtcatagaaaagtggaagtgcaaagagtggaccttccaggcagttgcgtccatgacaccaggaagatgtcagtgtgtgtttttcatttgatttatttatcttggggaaagtgaaaaatgtaatctgcaagttaatgaccctattggcttgtgtacatctatatgctaaaatgacttccccacattgacatttgtgcgccacctttaatcactctggggcaactctcacatcttgctgcatgtacatgtatacggctactattgaagtgtaattgtgagatggactccaacaagcatgtgactgtgagattgtgtgtgggaaaatgtatttaactactctgtgtgtgtgtgtgtgtgtgtgtgcgcgcgcgcgcgcacgcgcacacactcacgcacacacaagcagagaaggcgctgatcttgaactaatcctgcacaggcatccttccctttatagattgattccagcaaaggcggaataaaacaaatttcctatgaagagaatcctgatatgaaacaagtcatgtagtctcatggccgggaatctctccacagatactaacaacttaaacttactactttaggagaaaaaaaaaaacattcaatttcggacactgagttatatatgaaattaattaggctctagtccaacagttgtttacattttaaatagtccatattgaatttaattaaaacaagggatgcatgcagtcaaattgatagtttaattcttcaagtgataatataggaagtttcaccttgcctttgtccaagccccacctattaaaaccctttactcacagtttgaaactgaagcagtaaacttgtttccagacatctttttcagattgtcttaagcccaaagttgcctcacttccactattctcagcagccaaccaggatttggcagctgctccactgttacggttgagggaacagggatcagtcctgttagaagtctgtgagcctcaaactctacctgttctctgcaatcatccaaaatttgaaaaagaagctatatccagtgtttcactgccaaacagattcactactcttactgattcttcactgagctttgctagtataagcagagttccaagtctcccctagggttgtctctacatttctttatcattccagtgggtagggtttagctgggggaaggacatttcataagggttagttggactgagcagtatggacatttgcttttttcattacgtactgttgtttttccttgttaggtgtgctttggtggttttaatattattgtgccagggatggggaaatggggggggttgtgtgggaagagtacttattattgtgttttcttcagtgtaattgttcttggtaattgatacctctctgttttatttctctcattctttcaaaataaaactttttgaaatttggagg

SEQ ID NO: 270 - DNA, 800 bp, Homo sapiens
gtaaggtgaaggtgcccagcaggctgaggcttgtgtgcaacccagaagagagctcgctaacgccagcaagaaggttcagaacagcctggctttggaaaggaatttcatcctgcccacacactgcatagcaggagggaagcatgtctactttatccaatttcacacagacgctggaagacgtcttccgaaggatttttattacttatatggacaattggcgccagaacacaacagctgagcaagaggccctccaagccaaagttgatgctgagaacttctactatgtcatcctgtacctcatggtgatgattggaatgttctctttcatcatcgtggccatcctggtgagcactgtgaaatccaagagacgggaacactccaatgacccctaccaccagtacattgtagaggactggcaggaaaagtacaagagccaaatcttgaatctagaagaatcgaaggccaccatccatgagaacattggtgcggctgggttcaaaatgtccccctgataagggagaaaggcaccaagctaacatctgacgtccagacatgaagagatgccagtgccacgaggcaaatccaaattgtctttgcttagaagaaagtgagttccttgctctctgttgagaattttcatggagattatgtggttggccaataaagatagatgacatttcaatctcagtgatttatgcttgcttgttggagcaatattttgtgctgaagacctcttttactttccgggcaagtgaatgtcattttaatcaatatcaatgatgaaaataaagccaaatttg

SEQ ID NO: 271 - DNA, 2840 bp, Homo sapiens
aagatttgggggtcgccttgccggcctcctgtcctcctccggcggcggcggagcccgagagaactaggtgaacaccgctttgccagcctcacacagcgtcccctggctctgccgccgctccggacgtcgccctcccgttctgcttgggtccccttagtcgctacctttgctgggatccccctcctccatcctgtggcttcgggttgccgaagagcgatgctcggagggcggccggaagtggcgttggccgccattggcctgccggccagccaccttgctgtcctccgccgccttccgggtgttacatgcagccgggctcggcccctccccctggccggatggatccgtcggcgccacagccccgcgcggaaacctcaggcaaagacatatggcatccaggagaaagatgtcttgccccttctccagataatggaaaactttgtgaagcaagcataaaatctatcacagtggatgaaaatggcaagtcatttgcagtcgtcttatatgcagattttcaagaaaggaaaatacctcttaaacagcttcaagaagtgaaatttgttaaagattgccctaggaatcttatatttgatgatgaagatttagaaaaaccttatttcccaaaccgaaaatttccatcatcttctgttgcttttaaattatctgacaatggagactctattccttataccatcaataggtatttgagagactaccaaagagaaggaacccggtttctttatggacactacatccatggaggagggtgcattctgggtgatgacatgggacttggaaaaacagtacaggttatttcatttctggctgcagttttgcataaaaagggaactcgtgaggatattgaaaataacatgccagagtttttactaagaagtatgaaaaaggaacccctttcttctacagcaaaaaagatgttcttaatagttgctcctctttctgtcctctacaactggaaggatgaattggacacctggggatatttcagagtcactgttttacatggaaacagaaaagataatgaattaattcgtgtaaagcagaggaaatgtgaaattgctctaacaacttatgaaacactacgcttatgcctggatgaacttaacagtttggaatggtcagctgtcattgtggatgaagctcatagaatcaagaatccaaaagctagagtaacagaagttatgaaagctttgaaatgtaatgtccgcattggcctcactggaaccatccttcagaacaacatgaaggaactgtggtgtgttatggactgggctgtgccaggccttttagggagtgggacctacttcaagaagcagttttctgacccagtagaacatggtcagagacacacggcaacaaagagagaactagccactggccgaaaggccatgcaaagacttgccaaaaagatgtctggctggtttctcaggcgcaccaagactcttatcaaggatcagttgcctaagaaggaagaccggatggtgtattgttctttgacagatttccagaaagctgtctatcaaacagtgttagaaacagaggacgtgactttgatacttcaatcttctgagccttgtacctgtaggagtggccaaaaaaggagaaattgttgttataagaccaattctcatggtgaaacagtgaaaaccttgtatctcagttaccttacagtccttcagaaggtagctaaccatgtcgcgctactgcaagctgctagtacttccaaacaacaggaaacacttatcaaaaggatatgtgatcaggtattttccagattcccagattttgtgcagaaaagcaaagatgcagcctttgaaacactttctgaccctaaatacagtggaaaaatgaaggtccttcagcagcttttaaatcattgcaggaaaaacagagataaagttcttctcttttctttttccaccaagttgcttgacgtgctacagcagtactgtatggcgtctgggcttgattaccgacgacttgatggaagtacaaaatcagaggaaagactcaagattgtaaaagagttcaacagtacacaagatgttaacatttgccttgtctctacaatggctggtggactaggcctcaattttgtcggtgccaatgttgttgtattatttgatcctacttggaatccagccaatgatcttcaagccattgacagagcatataggattggacaatgtagagatgtcaaagtgcttaggctgatatccttgggaactgtggaggaaatcatgtatttacgacagatatacaagcagcaacttcactgtgtggtggttggaagtgaaaatgccaaacgatattttgaagcagttcaaggatctaaagagcatcaaggagagctttttgggatccataacctcttcaaatttaggtcccaagggtcttgtcttacgaaggacatcctggaggtgtgaacttcttctctgaccttttcaataatattttaaatacagtttttcttcctcaggaaatctgaaatacaattgctgttgccttttcagagaaacttttggttttctttatcaaaaatgccttggaatttttacttttagagaataagaaatgaattattgtacctctaaactaagattttcccatgcataattacaaataatgcacacacacaaatgtatatgctgggtagtatgaactccaaggcaattttaaataggcagagagaagtttatagttttgaaaacagctgctgaagtcaggaactaaaaaaagaggttttcctaaataaacaaaaatataaaatgtgttttaattaaaagttaccaaatactccctgagatgtactctcatgtctc

SEQ ID NO: 272 - DNA, 2834 bp, Homo sapiens
cggccggataggcgcgagggggccgcgtgaggcggtgccggcgttctggcccccaaagccggtctagcgcgccgggcgtcttccttacttccgctgccgccgccgccacatcccgggacccgacgggccgcggcgcggaggcctcggggcaaggtggggcgggcctcccgagctcccaggaccccgcgcgcttcgcccacaggcccggcgaagcccgacccgcgcggcgcccccagggccaggggaggagcctaaggacccggacgagcgccgctccagtaggtgacaagaggaaccaagaacctcagttcaggggaaacacagcaaggaaatgtgagccccaggctgcagaaggaagagtcagtgaatggctgcggtgtgacaacatgcaccaccagtggcttctgctggccgcatgcttttgggtgattttcatgttcatggtggctagcaagttcatcacgttgacctttaaagacccagatgtgtacagtgccaaacaggagtttctgttcctgacaaccatgccggaagtgaggaagttgccagaagagaagcacattcctgaggaactgaagccaactgggaaggagcttccagacagccagctcgttcagcccctggtctacatggagcgcctggaactcatcagaaacgtctgcagggatgatgccctgaagaatctctcgcacactcctgtctccaagtttgtcctggaccgaatatttgtctgtgacaagcacaagattcttttctgccagactcccaaagtgggcaacacccagtggaagaaagtgctgattgttctaaatggagcattttcttccattgaggagatccccgaaaacgtggtgcacgaccacgagaagaacggccttcctcggctctcttccttcagtgatgcagaaattcagaagcgattgaaaacatacttcaagttttttattgtaagagatcccttcgaaagacttatttctgcatttaaggataaatttgttcacaatccccggtttgagccttggtacaggcatgagattgctcctggcatcatcagaaaatacaggaggaaccggacagagacccgggggatccagtttgaagatttcgtgcgctacctcggcgatccgaaccacagatggctagaccttcagtttggggaccacatcattcactgggtgacgtatgtagagctctgtgctccctgtgagataatgtacagtgtgattggacaccacgagaccctggaggacgatgccccatacatcttaaaagaggctggcattgaccacctggtgtcatacccgactatccctccgggcattaccgtgtataacagaaccaaggtggagcactatttcctgggcatcagcaaacgagacatccgacgcctgtatgcccgtttcgaaggggactttaagctctttgggtaccagaaaccagactttttgctaaactaatgcataagacctatgaattcaaatatctttattagacctggggctaaccaggtgaagatctgagcccagaaatgacccttcctccaccacacccctcctttgaggacgcccggggtctcccacaggcctgtgagttgcctcggcatatgacgcagaaccccaactgttacaacttagtttggatgtaagatgctctgaggaccctgcccacacccctgcgtgcattaggatgtcgctggcctttgctcacctcagaggggagaaaaggctaaagatttgcagtttgacagcccagcagggaggaagcatcacacagcgttaggagccgtttccttcaggtgttaaggaaggggatgcccctgaggttctcctggctagtcagggtggcttcacccatcactggtgggttgcaggaacagcacccaggactctgaggagggacagagaagcaagggggctgctgaaatcgcagagacttttgcagcatcagatctgaggagtaaaacggcacctctggccttcatcttggtgctgcgacaattgtggaggcaaagcattctttctgtgactattttgttcctgtagacagtcagcgatggccagagggtggtgtggtgtccaggggtccatctttccagaatccatgcctgtgtaatgctggtccatgcttctgaacctgtgtctgccaagcgcctatttcattcagcacaagacatacgattttagaaggtgaggggaggggaggctttttctacctgagaaggggagtgtctttgagggccttaaaaggaccatggcccaggaatgggggcgctggttgggcttggagctcaggctgctgtggatcccggcgcatcagttctgacttgccttacctgggtggacagcagtgaatctccacctgtcttctccagggagctcccatgttggggctgaagacgagcaggggcaacctgccagcatcacagaattcagtgtagtttatacatttcgattcctttcatctcagcaaaatgggcactgccagagccatttctgatcacaccaccatcctggaccatgtgactggaaggtgggtaaccaagttcaccagcaataaaacccagcgcccaggtagcctccagcagtgcggcttcctggcaacaaggtaggccctggtgcagggcaagccgcagcgaccatttcagataccgtccacagccaggaccgctgagaactgggacagtttcctgggatgagtgccagcctgagcctgcatggtgccgccgagcccggggtggaggagggagccaggcttcgcttcaaggcggcctctaccttttctcagaatggtttcctgattgtgtcaatgtgaaagttaaataaaatttatgtgcc

SEQ ID NO: 273 - DNA, 1276 bp, Homo sapiens
gcggccgccgtggccaggcaacctatgggtaccaccgggttctcgcgggtcttgcgaacgaacttttccttgaaactctctggattcctgtaaacagtggggctcagcccctcaatgactggaggcttcgatggttcaaaggggacctccggaatcacagggccgggagtcgccatgtccgggccacagcagcaggagaaaatcgggactccgacctcagcctcccggtgaaggtcatgaaaggggcggggaaacgaataaattgagccttgtacgcaggcgcaaatgctcgttgcatcctgggagtcgtagtgctcagcacggtagtgctacaaaaggactacatttccccaaatgcccgcaaagccttgtgcacgccttccggaaggagtttgttacacgaggtctgagagacagaggcagcgtgtttgagctgctggtgcggtggtcagcgcgatgcccaaggccaagggcaaaacccggaggcagaagtttggttacagtgtcaaccgaaagcgtctgaaccggaatgctcgacggaaggcagcgccgcggatcgaatgctcccacatccgacatgcctgggaccacgctaaatcggtacggcagaacctggccgagatggggttggctgtggaccccaacagggcggtgcccctccgtaagagaaaggtgaaggccatggaggtggacatagaggagaggcctaaagagcttgtacggaagccctatgtgctgaatgacctggaggcagaagccagccttccagaaaagaaaggaaatactctgtctcgggacctcattgactatgtacgctacatggtagagaaccacggggaggactataaggccatggcccgtgatgagaagaattactatcaagataccccaaaacagattcggagtaagatcaacgtctataaacgcttttacccagcagagtggcaagacttcctcgattctttgcagaagaggaagatggaggtggagtgactggtttacatcacagctgccccaggctgaggcgtcccccggaccagtgaagctggagccagggtgtaaggcaaggaggtgctgtgtggctccagaggagctggccaggtcccatggaatcagaaggttacacacacgtgcacactccccgctctggggaaggaactgttctcagaggctccaatttatattcatctgggggttcacggaaaagccagaacctgctgttttcagggtgggtgatgtaaatatagtgtgtacataataaagcaaatatatttta

SEQ ID NO: 274 - DNA, 3137 bp, Homo sapiens
ctccgagccccccctccccgtgctaccccctccccccgggtgctggctccatgtctgtgtgaccggcctcaggggtagagtccaggcccgacgcggggcgggccagcggcggcggcagctgaggtgagagacggcggcggcggcgcgggcacccggccccccagcgggaggatgaagcggcggaacgccgactgcagtaagctccgccgccccctaaagcggaaccggatcaccgagggcatttacggcagtacatttttatacctgaaattcctggtggtgtgggcacttgtcctcctagcagattttgtcctggagttcagatttgaatacctgtggccattctggcttttcatcagaagcgtctatgattccttcagataccagggactggccttctcagtattttttgtttgtgtagcattcacgtcaaatataatatgcctgctgttcatccccatacagtggcttttttttgctgctagcacatatgtatgggttcagtacgtatggcacacagaaaggggagtgtgtttgcctacagtgtctctctggatcctctttgtttatattgaagcagccattagatttaaagatctcaaaaactttcatgtagacctttgtcgtccatttgctgctcactgtattgggtaccctgtggtaactttggggtttggcttcaaaagttacgtaagctacaaaatgcggttaaggaagcaaaaagaagtacaaaaagagaacgagttttacatgcaacttcttcaacaagctctccctccagagcaacagatgctacagaagcaagaaaaagaggccgaggaagcagccaaaggattacctgatatggattcttcgatccttatacaccacaatggaggtatcccagccaacaaaaaactctccacaactttgccagagatagaataccgagaaaaagggaaagaaaaggacaaggatgccaaaaaacacaaccttggaataaataacaacaatattctacaacctgtagactctaaaatacaagagattgagtatatggaaaaccatatcaatagtaaaagattaaataatgatcttgtgggaagtacagaaaatctcttgaaagaggactcatgcactgcttcctcaaaaaattacaaaaatgccagtggagttgtgaactcttcacctcgaagtcatagcgccacaaatgggagcattccttcctcatctagtaaaaatgagaagaagcagaaatgcactagcaagagcccaagtacacacaaggacttaatggaaaactgtattcctaataaccagctaagcaaaccagacgcactggtcaggctggaacaagacattaaaaagttaaaggctgacctgcaagccagcagacaagtggaacaagagctccgcagtcagatcagctccctttcgagcaccgagcgagggatccgctcagaaatgggccagcttcggcaggagaacgagctgctgcagaacaagttacataatgctgtgcaaatgaagcaaaaagacaagcagaatatcagccagttggagaaaaagctaaaagctgagcaggaagcccgaagttttgtagagaaacagttaatggaagagaaaaagaggaagaagttagaagaagccactgctgcccgggctgttgcgtttgctgctgcatctaggggagaatgcaccgaaaccttacggaatcggatcagagaactagaagcagagggcaagaagctcacgatggacatgaaggtgaaagaagaccaaatcagagaactagaactaaaagtccaggagcttcggaaatataaggaaaatgagaaggacactgaggtgttaatgtcagccctctcagccatgcaagacaaaacacagcacctggagaacagcttaagtgcagagacgagaatcaagctggacctgttctccgcactgggcgatgcaaagcggcagctcgagattgcccaaggacaaatccttcagaaagatcaggaaatcaaggacctaaaacagaagatagccgaagtcatggccgtcatgcccagcataacatacagtgccgccaccagccccctgagccctgtttccccccactactcttccaaatttgtggagaccagcccctctggacttgaccccaatgcctctgtttaccagcccctgaagaaatgaaggccagctgtgtgttgtgcccaaaaatttggttaccggaaggcattgcaaaggagcgtctctggcagtcaagataaaaaaacagtttctattgtattttgtggaactgtatctgttgtcatttttaaaaaggggggaaaagataacatccaagtctgattagaactgcccatcagtttttcttgtaaatttttagaagacctcacagaactttacagtttatttttctcggccaacacattaaaaccattcttggatttcaagtagccaactttgccttttatgtattcttacatagtttcctcttgaagaaaaaaaaagcagagtttttgtttttcaaccctttatgtttgttttgttttattcttaaataagcaagcaaaacctgcacattggattcacgtgagatgataatgaaaacttttagtttaagagtgaagggttaagtaacctaacagagctttgatgttatagctgcattaaagaaggtgattgtcaatattacagaaaacaaaaatggattgcccctccaaggaccaaacagattcaaggagcatcatttaagctaagaagagacctaagtgatgaaactagctgtaagaatgtaacaggggttgtgtttgaaatatttatattcccatcggtgtgtttagtcctagaaaattgctagcagcagtcttcttcacagtgccttgggaaaagacatttcaagaggaaacttgataattttaaactcttttccccctttaccgtcatctatcctctatctgtatcaagctcactgcggatcctgctgtaaaactggtgggtagctgggctgtccgttaccaccacagctacatcttctgtttctttgaatagaaagcaccacagtgttttgcacttgcctccagtaaagtgccctgggaagggagctgggcagtgtttgtggacgagagactgtaacgatggctaataaaagctgcgggtct

SEQ ID NO: 275 - DNA, 4798 bp, Homo sapiens
cggcgaagtggagcgggctgagagtgggtttcccgtccccgagccctccctcatctcggagatgccgcacttgtgagcgacagggcttcatttgaattttcgcacctcgcgagttgcggagcctgcatctctgaagctgcctcggtgaagagccacagcattattttttttctctttgggagagtagctgtctgggatttgagatcctatcttccctgcaaattaccaggttgcatcttcactgataggaatacatttcttcaccaaaggacatggatgaaaatgaaagcaaccagtctctgatgacaagcagccaatatcctaaagaagcagtaagaaaacgtcaaaattcagcacggaattccggagcaagtgattcttctaggttttctaggaaaagcttcaaactggattatagactagaagaagatgtaactaaatccaagaaaggaaaagatgggagatttgtgaatccgtggccaacatggaaaaacccctctattccaaatgttctcagatggctgataatggagaaagatcacagcagtgttccaagttctaaagaggaactagacaaagaactcccagtgcttaagccatattttatcactaaccctgaagaagctggagtgagggaagctggcttaagagtcacatggctgggacatgccacggtaatggtggaaatggatgagctcatatttctcacggatcccatctttagctctcgtgcttcaccatcgcagtacatgggtccaaagcgatttcgtcgttccccgtgcacaataagtgaactccctccaatagatgcggtccttatcagtcacaaccactatgaccatctggactacaattctgtcattgctttgaatgagcgatttggtaatgagttgagatggtttgtgcctttgggtctccttgactggatgcaaaaatgtggctgtgagaatgtgattgagttggactggtgggaggagaattgtgtccccggacatgataaggtcacttttgtctttacaccttcccagcactggtgtaaaaggactctaatggatgacaacaaggtgctatggggcagctggtctgtcttggggccttggaatcgattttttttcgcaggagatactggttattgccctgcttttgaagagataggaaaaagatttggaccttttgaccttgcagctattcccatcggagcttatgaaccgaggtggtttatgaaataccagcatgtagacccagaagaagctgtaaggattcacactgatgtccaaacaaagaaatctatggcaattcactggggaacttttgccttagcaaatgagcattacttagagcctccagtgaagctgaatgaagctctagagagatacggacttaacgctgaagatttttttgtcttgaagcatggagaatcaagatacctaaataatgatgatgaaaacttttaataaataatttcctgaggtgaaaaaccgatattgaagattcatttttcttttttccattcttcaggaccttcggcaaggtgagtcaaggctctctacctacctagatgtttttcagaggcctacaaatacaagtatctttcttatatgcacattctaataaatgatgaaattcagtccaacatgcttattataaacatagcaattcttgctctatcaaattagcttatatgccaaatattaaatatggtttatttaggtaagcataaaaacataggggctatcatttttaaagacttgattttctctattgtggtaaaatatataaatacatatttgccattttaaacatttaccattttaaccatttttaagtgtacagttctttcgcattaatgcacccatgaccaccattcacttaaatttttaaaagaacagtatattctttttttcctagagccttcagatgagagggaacagtatattctattgcacgtctacaattcccaaaagacctcttactttgggaggccaaggtgggtgggtcacttgaacccaggagtttgacatcaacctgggcaacatggtgacctcccgtctctctcggaaaaaaaaaaagaaaaaagaaaaagccgggtgaggtggtgtgtacctgtagtcacaggtacttgggaggctgaggtgggaggatcacttgagcccaggagatagaggctgcagtgagctgtgatcgtaccactgcactccagcctgggcgacaaaatgagaccctgtctcaaaagaaagccctctccttagctgagcagaggaagggaaggagtgtggctatgagaatatgatttatgccattttctgtttttaaatctagaagatcttctaagcacaaatacagctacaatgaaatattttacagacaaaatgttaatagaccatattctttgaattaaatttgtttttaattttctctacacattttttttttcctggagtctcttagctctaaatatatcaatcagatttataattttttttacctgattcagatgtcttacatttttatattaaatgaaccttaagcatgattcttttggtaagccagtatgaatgccagtggttggggggcggggggggagtcagttgacataagatttagtcctaataaggactctgtattcacttgattattctgacccttcctaagggagggaggtggattagataccactggaggcccattctgtattcctaatccagtctcagcactttattcatacaaaataatcaaaataggttttctacaccaaatgctacccaggcagtgctctataatttatttgcacacctgtatgtgtggtgccacgttagccactaaatctgaacttttaccctgctttcatcatggatttttttgtgtaacctgaaacaagtcaccagtgctcactgtgcctgtttcctcatttgcaacaagaggataattccgacctacctctgaaaaatgtgtagattaaatgagtttttaaagcactttagaaaatataagggagaaaatgatttcttaagatatcactgcctaatatagacaggtatatttgaaagctaaatacaggttaatgcttttgataatgtattgttcctgttgcaaatttaagcattatatattaggagactaaacattgaaaactttcactgatttttaaattggagtaatagcctaaataagtgtaaataatctttatcaaaatttagtgtttatctacaaagatgcgaatcagtcaaggggaaatgtgtatgcaatgtgtgtgtatatgatgtatgcgaacatatgtgattttggggtactaaagcacaaaaaaatcccccataaaataaaccttcctgaaaagactgatcataaactttttcactccaagcagatgtgaatcaagatgttaggtttatggtgagttagctttgaggtgtgttgccctaatactagccagcgttgttgtagccatattccctgctgctgcacgccgaattgaaaatccatctcttacctcttctctatgaagcaagccaggtatgtcttgcttaagtatttcttctccatgaatggccttaacattattttgtattcacgtgtactgtttaactgagggtctcaaagcactttaaactgttgtgttctatttccactcgtctggcctgcctcatttttctaggcccttttgtaagctgtaattttttattaccactcatgttctttctacactgacactattcattaagaacatcaagcttcatctctgcttacagaatctcaccttattgagtgggttccactttatttttcatttgttatctacattttgaagggtttatgtgcaaagtgaaaacaaattttgaaaaataagacaaatccattctcttcttcaattcagtctaatatgcattgtagtgtcttttaatcagtcttatcctctaagtcaacttcattttcctcttcgtgaatacccatagcaatatgtaagattttattgaagtttcctgtgataactgaggaatactttgctatgcctcactgcccaatagggtgggtcatcaattaggagaaatcccaaattataaaagccaacatatgccgtgacctacgtaggaaaagatgtatttgtgcatcttctttctgggtagttaaaaattactccctcttttctctagcattttgacatttcagactcaatgctctgatctctagggagtgtgattattcaaactaatgagaggacaagaagacacagttttagaatctactgctgctaaagcacattaaaaacaaatcctggtttttaatgtatgcatagtttcatatttaatgaatatgctttcattaaatagggaggtagatttgaaaaaaccgttataaagaaatgtgccttttggggaatgaatacttttgttcatgtctagcccactgggaattttgttttcaccttatactgagtcctttttctaatgtaaaaatatttcttccaagtttgatttctgtatcagggtaacattgagaacacacatatttctgtttgaggatttgtgacttcctatggaaacagtcttgcatctatgtatttacaaatgaaatttaaagtattcttaaagctttgccttaaatactgcttgcatactgatttacttaatgctaagcatggcaggggttataaatttaaatactataagacctggctgaatcccagatgtatcaataaattgttatagtagcttatggaaaatgctattaaagataaattttcatacattgtatttttagtcaagtaaaatatggatgaaaattaataaagtactgtcaaggg

SEQ ID NO: 276 - DNA, 3172 bp, Homo sapiens
agtcgaggtatcttctccccaaccactgctcttattttaattattgcagacggaagttgaagactattgacatagtaaatagctctgggtggcttgaaacgaaagtttaactttgcggacaaacaggacttattgtagggggtggtcaaaatagtcccggcggggcggggccatgacccctgacgtcgccggtccggcgcgcagttcagtttggcggttccggtaccgctctcacattggggcgggatgtgggagcggctgaactgcgcagcagaggacttttattctcgtctccttcagaaatttaatgaagaaaagaaaggaatccgtaaagacccatttctctatgaggctgatgtccaagtgcagttgatcagcaaaggccaaccaaaccctttgaaaaatattctaaatgaaaatgacatagtattcatagtggaaaaagtgcctttagaaaaggaagaaacaagtcatattgaagaacttcaatctgaagaaactgccatatctgatttctctactggcgaaaatgttggaccacttgctttaccagttgggaaggcaaggcagttaattggactttacaccatggctcacaatcctaatatgacccatttgaagattaatctgccagttactgcccttcctcccctttgggtaagatgtgacagttcagatcctgaaggtacttgttggctaggagctgagcttatcacaacaaacaacagcattacaggaattgtcttatatgtggtcagttgtaaagctgataaaaattattctgtaaatcttgaaaacctaaaaaatttacacaagaaaagacatcacttgtctactgtaacatccaaaggctttgcccagtatgagctctttaagtcctctgccttggatgatacaatcacagcatcacaaactgcgatcgctttggatatttcctggagtcctgtggatgagattcttcaaatccctccactctcttcaactgcaactctgaatattaaagtggaatcaggagagcccagaggtcctttgaatcatctctacagagaactgaaatttcttcttgttttggctgatggtttgaggactggtgtcactgaatggctcgagcccctggaagcaaaatctgctgttgaacttgttcaggaatttctgaatgacttaaataagctggatggatttggtgattctacaaaaaaagacactgaggttgagaccttgaagcatgacactgctgcagtcgatcgttccgtcaagcgtcttttcaaagttcggagtgatcttgattttgctgagcaactgtggtgcaaaatgagcagtagtgtgatttcataccaagacttggtgaagtgtttcacattgatcatccagagtctacaacgtggtgatatacagccatggctccatagtggaagtaacagtttactaagtaagctcattcatcagtcttatcatggaaccatggacacagtttctctcagtgggactattccagttcaaatgcttttggaaattggtttggacaaactaaagaaagattatatcagttttttcataggtcaggaacttgcatctttgaatcatttggaatacttcattgctccatcagtagatatacaagaacaggtttatcgtgtccaaaaactccaccatattctagaaatattagtcagttgcatgcctttcattaaatctcaacatgaactcctcttttctttaacacagatctgcataaagtattacaaacaaaatcctcttgatgagcaacacatttttcagctgccagtcagaccaactgctgtaaagaacttatatcaaagtgagaagccacagaaatggagagtggaaatatatagtggtcaaaagaagattaagacagtttggcaactgagtgacagctcacccatagaccatctgaattttcacaaacctgatttttcggaattaacactaaacggtagcctggaagaaaggatattctttactaacatggttacctgcagccaggtgcatttcaagtgaagtgtgctgatgaagtcctctataagcacaagccaaaaagagaaagagaaaaaaaggtaattattgtagaacctgaaaacagcaatgtatggaaaccctcaaagcagaaaagggaggaagatcctgaagattctcttatgaagctccaaaattgataatcctgtctcagctctgcctcctcaggaggagcattagtagaacagcagtgatgaggacacagagggagcagacagtgggtaccacgatctccgtaaccatttgcatgtgacttagcaagggctctgaaatgacaaagagaacgagcaccacaaatgagaacaggatcattttagtaaatacagctttatcccaaaagctttaactgtattgggaaaacttaaaaaatagcatcctcaaattttctgattcttatttgccatgaaatagaacttagtaaattaaatgttatttgaaaatgttataagagctttgtaaatatttcagaaaatatgggataaatgcctgaatttggttcttctacaggtgctataataaagtccatctctcaatacttatactttctaaattcatctcagaatattagcagccatattccacagttcctataatttttactgggggggatttgtgataggaaagtccttgggaaacatttccaatctttcaaaatattattgtgtatcttaagaagtataggaacttgtatgttgaaatgttgtatggtagttcttgtatagttaaataataatctttttaagagttaatgataagcatatgttatgtgcattattaataaaatagtggccacttaggtaatacccacttttatcttgtgtgctgggtactctggttactgagataaataaggcactggacatcctcacgtggagttcacaggctcatcagtgaattctgtaccacatttcaaccttgtttattttagtttaatggaatatacattcttagtattgcctgattatttaaatttgttgagggggattgcatgttgctttattggcctgtaaaaatagctagtttggtaagatttggtctcgcaccttccatctttgctaccacattaaagatgagcttgttaaaaaggaaagcatatttctctgattgcccttatggagaaataaagataaaattc

SEQ ID NO: 277 - DNA, 1821 bp, Homo sapiens
agacttctgcgtcgcggaagcgggtcccgcaggtcgccacggttgggggaaacgcggcggacgccgcccccgtcccgaaggggactcgaaaatgtacagccagcggtttggcaccgtacagcgggaggttaagggccccacccccaaagtggtgatcgtgagatccaagcctcctaaaggccaaggagctgagcaccatctagaaagaatccgacgcagccatcagaagcataatgctattttggcttccattaagtcaagtgagcgggatcgcttgaaagctgagtgggaccagcacaatgactgcaagattttggacagccttgtgcgagcaagaatcaaggatgctgtgcaagggtttatcattaacattgaagaaagacgaaataagctacgtgagcttttagcattagaagaaaatgagtattttacagaaatgcaattgaagaaagaaaccattgaggagaaaaaagataggatgagagagaaaactaaattactaaaagagaagaatgaaaaagagaggcaggattttgtggctgaaaagctagaccagcaattcagggaacgctgtgaggagctccgtgttgaattgttatctatccatcagaagaaggtgtgtgaggagcggaaagcacagattgcatttaatgaggagctgagcaggcaaaagctggtggaagagcagatgttctccaaactctgggaggaagaccgattagccaaggaaaagcgagaagcccaagaggcgaggagacagaaagagctgatggagaacacacgcctggggctgaatgcccagatcaccagcatcaaggcacaaaggcaggcgacacagctgctgaaggaagaggaggcacgccttgtggaaagtaacaacgcacagattaaacatgagaatgaacaggatatgctaaagaaacagaaggcaaagcaggaaactaggaccattttgcaaaaagccctacaagagaggatagaacatattcagcaggaatacagagacgaacaggacttgaacatgaagctcgtgcaaagggcccttcaagacttacaggaagaggcagataaaaagaaacaaaaaagagaagatatgataagagaacagaagatataccataaatatttggcacagagacgtgaggaagaaaaagctcaggagaaagaatttgacagaatattagaggaagacaaggcaaagaagttggctgagaaggacaaggagctgagacttgaaaaggaggcaaggagacagcttgtggatgaggtcatgtgtacaagaaaacttcaagttcaagaaaagttgcaacgagaagctaaagaacaggaagaacgtgctatggaacagaaacacataaatgaaagtcttaaagaacttaactgtgaagagaaggagaattttgcaagacgccaacgtttagcccaggagtacaggaagcaacttcagatgcaaatcgcctaccagcagcagtcccaagaagcagagaaggaagagaaacgccgagagtttgaagcaggtgtagcagcaaacaagatgtgtttggacaaggtccaggaggtcctgtccacccatcaagtgctgcctcaaaacattcatcccatgcgcaaggcatgccccagtaagcttccaccgtagttccgtgagcatcaatatatcttttcttggtcttttaatatttttaactacagtatgcttgtatgcttcttttaactcctggataaacttttcttttttccctgagtttgtgtaattaattgaacataattttcttcctttgaataaacctgtgcctattttggagttcacagacttacaaatcc

SEQ ID NO: 278 - DNA, 5437 bp, Homo sapiens
agtgggggcctgatagcgcggcggtgtggaccgcgcggccgaagagcgcggcgcccagagcgcgggccgctcgcggagccacagcccgagccgggtcccagccggagccgagccccagccgagccgagccgggcccggagcgcccggtgcccgcagccatgccggccggccgcgccgcgcgcacctgtgcgctgctcgccctctgcctcctgggcgccggggcccaggatttcgggccgacgcgcttcatctgcacctcggtgcccgtggacgccgacatgtgcgccgcgtccgtggccgccggcggcgccgaggagctccggagcagcgtgctgcagctccgcgagacggtgctgcagcagaaggagaccatcctgagccagaaggagaccatccgcgagctgaccgccaagctgggccgctgcgagagccagagcacgctggaccccggagccggcgaggcccgggcgggcggcggccgcaagcagcccggctcgggcaagaacaccatgggcgacctgtcccggacaccggccgccgagacgctcagccaactcgggcaaactttgcaatcgctcaaaacccgcctggagaacctcgagcagtacagccgcctcaattcctccagccagaccaacagcctcaaggatctgctgcagagcaagatcgatgagctggagaggcaggtgctgtcccgggtgaacaccctggaggagggcaaggggggccccaggaacgacaccgaggagagggtcaagatcgagaccgccctgacctccctgcaccagcggatcagcgagctcgagaaaggtcagaaagacaaccgccctggagacaagttccagctcacattcccactgcggaccaactatatgtatgccaaggtgaagaagagcctgccagagatgtacgccttcactgtctgcatgtggctcaagtccagcgccacgccaggtgtgggcacgcccttctcctacgctgtgcccggccaggccaacgagctggtcctcattgagtggggcaacaaccccatggagatcctcatcaatgacaaggtggccaagttgccttttgtcatcaatgatggcaagtggcaccacatctgtgtcacctggaccacccgggacggggtctgggaggcctaccaggatggcacgcagggtggcagtggcgagaacttggcgccctatcaccccatcaagccccagggcgtgctggtgctgggccaggagcaggacactctgggtggtgggtttgatgccacccaggcatttgtgggtgagctggcccacttcaacatctgggaccgcaagctgacccccggggaggtgtacaacctggccacctgcagcaccaaggctctgtccggcaatgtcatcgcctgggctgaatcccacatcgagatctacggaggggccaccaagtggaccttcgaggcctgtcgccagatcaactgagcacggcaggccaggctgagcccgcccgccctcgccccctgcttgtgcggcgatgatctgttttgtgcgtctcttctctcccttttccccaggaatgaaccgaggccgtcgcccctgcacacgcacacgcacacagcctggttttgtcctcatgcacacgaagcagcccctgctcccatctgtccctgaggaagccccacttctctgtaggagcccggactctctcaggcatgccccattcacagctgaagtgggtgctgcaacgtcttgaacaaggcagaagttggtgagaggatctgtgtgtgcgtgtctacatgtgtgtgtctacgtgtgtgcgtgcgtggctgggggaggccttttctttgaggacgtacctcatttccttctttcttctggctttggaaaaatctcatgatgaaaattcatatttgccaactttgttagctgcgtgcgtgctttggggttggtgcaacctcagtacacgcatttgtctttgtttgcaaacctttctcagagcgacatatctttatattgatgtaataaatgtcttttagtggtttgtcaaaggccgggggcgggggctctctacagagaatttttattttgtaatagaagtgaactgtctctgaagggtgaaggcaggccgtcctgggatggtaccctgtgctctcccgtggaggagaggggatggctgaggacactggcccttaccccagggccagacagcatccatccctgctgtttgcatctgagagcagcatggggcctgggaggtcggcctgtgtgcccagctcagctagctctgccccaggacggccctgccctcgaccttcccacctcctcagatcctgcaaggctggggtctgcccctcccttctcacctctggagctgtgctgcactgcttcagcccagagggccctgagagaggagcgtgccacccacagcccgggaagccgggccccagcacccctctcctttggcctccggcagtgcagaccagaggggaccttttaaggaaagaagccgtgtttcgatgaagacctggccacatggggccactgggacttcaacccagcccatcggtgggaaggtcctttttgggggactttgacagccatatccctcccagcacaccaggcgccaggtgagctggttcagacccctccaggggtactccagagacctcacgtgtggagccaggcctggccagggcaggggcctgaaacccactcctccatctcatggggctcacggcctacagcagcccacaagctgccactggccggcgacactgacacctgagcagtgtccagaacctttttgcctttttttgttccccgtgaaaagcaacatggacatttccttctagtccttccaaggaggggagagaagtgtatgtgcatttgtgtgtgtgtgtgtgtgttgtgtgtgtgtgtgcgctaagtgagaaagagagcaggctcgggaggccctgcccagggtaggaggagcttcctgctttgcaccatctggtggtcgcacgccctgagggcaccccgactctgtctccaggagtctcatcagcaaaccgctgacaagtctttctagaaattctactgcactgcctggctcagctgcagctgcagacatttctgcaggaggagcaggtgtttctgtcttctgttccttctagggccacctgtccccttaaacacaggtccacgttgtgtcaagaacctagtgcatctgtgtgtgtctgtcagtgtctctgtgtcagtgttctcgtgggtgtctgcacggtacccggccgccgttctgcaatgcatcactcccgcagaggggggtgcagatcaggcgccgtgctgcgcgttgttgttcaacagtggctttttcttagataatcgtgcttcctcagcgcccgtcgggttgtggcatccttggatctgcagggatcttctccgtttgcatgttcctcggggtggcgtgttccttgctccctgggtccgacatgtgttcccgcacctgcatggactgccccggttctgtgttgtgtgccgagtgccgcccagtgttctgtgaccacccgtgtagctactgaaaatggctgggtaagcaagtcaagggtgttggaggaggtcaagagagagctcagtttccctctccccctccccaaacacaccaagaagcatttttaacgtgtaggttgagaacaagcctaaaggattcccacagctgggagccagcaagagagcttggagtcgcctctctagaccagatctagccccaccctcactccagccatctcggagcccttgtgtaggcaacgcccggtgcgggctgtgtggggtgctcccctgccagcacctccggccagccccgcccctgccgatctactggaccgcagaccaccttctgcccccgtgggccaggtgggagctgtccgttcaggaccatgagccatcctctgccctgactagcgaggggcagagcacaccccagtgcttacgcctccacccctgcagcctcctggcccgctcaccttcctcacccctcctctgacccacccatggtgccagggccgaagctgacctttagctccctcctgccccttgctagggtctgagccaagcccctcgactccctcactgtgttgacacttggcactttgctggccccgagaaaggtcgatgacacagccgcaaatctaatccacgtagttcccatttactccttaatctgattgatgttccctcttgcactgaataatacatgcctctctcaggtaagccattttataaaacaagaagataaaaagcactgttgaggcagtgtttgcttttgccgagctggtgtccgacagctccctgggtgtccggggtgggagagctgttgacagaagctctccgggccctcaggggcttagatcccacttgagtcgtaagccttcttgcttttgataacacagtattatttctcttactgtagaagaaaaagtttattaccaaacaagagtatttttatgaaagaaaaggacaaacctataaattaactcaacctatatctcccttgaaaatactttcaggctccaccaaaacgtagaactgaaagcatgtattttggaagaaagagatacattttgtatgctttcttttccttttgtagattcccagtttattttctaagactgcaaagatcactttgtcaccagccctgggacctgagaccaagggggtgtcttgtgggcagtgagggggtgaggagaggctggcatgaggttcagtcattccagtgagctccaaagaggggccacctgttctcaaaagcatgttggggaccaggaggtaaaactggccatttatggtgaacctgtgtcttggagctgacttactaagtggaatgagccgaggatttgaatatcagttctaaccttgatagaagaaccttgggttacatgtggttcacattaagaggatagaatcctttggaatcttatggcaaccaaatgtggcttgacgaagtcgtggtttcatctcttaaacacagtgtgtaaatttattcaactaacgatgggaaatgtattacttctgtacacagtggactgaagtgcaatttgttgaaagggaacaagtcattgaagagaaaaaaaaagcccaatacttagagtcccaattttgtctcatttgccaaaaaaaaaaaaaaaaaaaaagcaaaccccctatggttgatattgttataatgtatatactgtataatatgaaagagaatcgatgtatctcactttttcattatttgctaaccaaagctgtacatttttcatatgatctgcagccttttgggtatcaaatgggtcaaaaccatgggacctgccacctcccatcagcaattctggaaatgcactatttctactggtattcttgctttttttttttttttcattttcttgctgaaatgacatgaattgttgagtttatttttacacagtaaagagtggagaaagact

SEQ ID NO: 279 - DNA, 4848 bp, Homo sapiens
gactgcgcggcgggctgtggctgcggaggttgaggggcgtccgaggcgcggaggggctggctgggcaggaggggttggcggggcagcagggccgcggccatggggagcttgaaggaggagctgctcaaagccatctggcacgccttcaccgcactcgaccaggaccacagcggcaaggtctccaagtcccagctcaaggtcctttcccataacctgtgcacggtgctgaaggttcctcatgacccagttgcccttgaagagcacttcagggatgatgatgagggtccagtgtccaaccagggctacatgccttatttaaacaggttcattttggaaaaggtccaagacaactttgacaagattgaattcaataggatgtgttggaccctctgtgtcaaaaaaaacctcacaaagaatcccctgctcattacagaagaagatgcatttaaaatatgggttattttcaactttttatctgaggacaagtatccattaattattgtgtcagaagagattgaatacctgcttaagaagcttacagaagctatgggaggaggttggcagcaagaacaatttgaacattataaaatcaactttgatgacagtaaaaatggcctttctgcatgggaacttattgagcttattggaaatggacagtttagcaaaggcatggaccggcagactgtgtctatggcaattaatgaagtctttaatgaacttatattagatgtgttaaagcagggttacatgatgaaaaagggccacagacggaaaaactggactgaaagatggtttgtactaaaacccaacataatttcttactatgtgagtgaggatctgaaggataagaaaggagacattctcttggatgaaaattgctgtgtagagtccttgcctgacaaagatggaaagaaatgcctttttctcgtaaaatgttttgataagacttttgaaatcagtgcttcagataagaagaagaaacaggagtggattcaagccattcattctactattcatctgttgaagctgggcagccctccaccacacaaagaagcccgccagcgtcggaaagaactccggaagaagcagctggctgaacaagaggaactggagcgacaaatgaaggaactccaggccgccaacgaaagcaagcagcaggagctggaggccgtgcggaagaaactggaggaagcagcatctcgtgcagcagaagaggaaaagaaacgccttcagactcaagtggaacttcaggccaggttcagcacagagctggaaagagagaagcttatcagacagcagatggaagaacaggttgctcaaaagtcctctgaactggaacagtatttacagcgagtacgggagctggaagacatgtacctaaagctgcaggaggctcttgaagatgagagacaggcccggcaagatgaagagacagtgcggaagcttcaggccaggttgttggaggaagagtcttccaagagggctgaactagaaaagtggcacttggagcagcagcaggccattcagacaaccgaggcggagaagcaggagttggagaatcagcgtgtcctgaaggaacaggccctgcaggaggccatggagcagctggagcagcttgagttagaacggaagcaagcacttgagcagtacgaggaagttaaaaagaagctggagatggcaactaataagaccaagagctggaaggacaaagtggcccatcatgaaggattaattcgactgatagaaccaggttcaaagaaccctcacctgatcactaactggggacctgcagctttcactgaggcagaacttgaagagagagagaagaactggaaagagaaaaagaccacggagtgactgagcttgctggcagtcacgtcagttatgtagatactgcatggcaggagagctttacgctaaagacaaaagaaacagctttgggggccgggcgtggtggctcacgcctgtaatcccagcactttgggaggccgaggcgggtggatcacctgaggtcaggagttcaagagcagcctggccaacctggtgaaaccctgtctctactaaaaatacaaaaaaaattagctgagcgtggtggcgggcgcctgtaatcccagctacttgggaggctgaggcaggagaatcacttgaacgtgggaggcggaggttgcagcgagctgagatcatgccgttgtactccagcttgggcaacagagtgagactccatctcaaaacaaaacaaaacaaaacaaaacaaaaaaacccggctttgctgcttttaactcttcttccttctgtgcctctctaagtgggtcagtatcctaaggaagccttcttatttatcttcctgcaaacaagggttacctgaaaagaaaaaaaaagtcaacattgtcaagctgtttgtttactctttctttgaaaacatcaccttctgaaatttgtcttttagctctctcagattcttccccaaatgaggcagggtgcagacagcacagtcagctctgcagagtttggaggggctcactgccactgggtactcagaacctctgtggactggatgtcagctctttcctttggcagcgtgtttccttttccgagtatgtgctgttaaactagattggccggttcgctttccatttcctgacacttgacatggaatgcctttgaccattggtgctctgacagagaagtcatggagtcattgccatttcctggttgcccttttggaatgtgatcctgttagtagaggttttctagcttctactaagatatttctttccctaaccatcatacacttggcatgtttcattcccatctcctttcccctcaccttaaaggagactacccctttgccccatattgtcaacctaattttctctcgtactctctctagtgaatgatgtgctaccaagtatatgccaggctgtgagaggattatactgagtagtagaaagaagctaatttgaaataaaaattatttgtataattaagaaagcagattagatgcacatggtcaacaggaagttgactgtatgtctgctagttagattcaaaacatcataaagatgatagcatgtcaatatattagcctagccattatgttagcctttgttaggtgggcagcttttctgctttttcccttcctctgtggtgacaacggaggaaatatccaacagaaatacgtctaacagggaaattgggatcatagtttatatgcatctgatttgaaaggagtattgaggaaggttttcatatatgatctatctttggattaaaaagaacatttatgaaatcaagccttctaacactagttataattgagaagcaacagtaactccgtggacagcaatcaagcttaaaattgtaaataaatatggggataattcagttgttgcaaaaaaagggcagaattcagtagaataaagtccttttctcttacaggtattaaatgaggacagagaacctcaggtgttcttatgctagtgcttgctgagtgcatactaagaaagcaattccaaatagatgtatacatctagagagagtggtattagagattcagtgtatgtatttatttacatgagaggaaactggaatataatcccataaattatcaccttttatgactggaaaatatttgccaatgaagaaatggtctgtaggtatttgtcttaagatttttggctgtttaataaaaatgtaactttaacggtttcttatagttgcctttataaagtgtattgtctaaaatatttttgtatcatgtgcctttgaaatttgacagctgatttgggtgttggatttctgcccagccatttatcagtattatcattttattcagtagctggcaggtgtattagaccaacgagacttaggtaaggaatggaacctttcctgtggtttgactgcacattacaccagaagactccagtatccctcattccagaatgaggaaaaagtattctacaaagaacctaatcacctctgtgaaatctatgggatggaaacagtgtggccttaggagtcaaatagtctctgcatggtggggaggatcatgatggaatatgtgaatttctacttctagaagttgtgaaataggtcctgcacttttgcagaatgtccttctttaaacctggcttattccacagctgtagctgataacatgacctggggcttagctgctctagccctgggttcttggagacctcacactgcctggcccctggccatccacctaaggactgcctgctttctggtcacatgtggaccttgatacgactaagcggttacatatgtggttgtgcaaaagctttctgtttaatgcatagtgttaccgatttacatcttggttttcagtggcactatgtctaggaggcaatatccttttaaacagtgctttggctaagatagatacttgtgaatcaaagatagcacagaaatgaactaagtatatcccatttggaattatattttgatactatttaaaatggtttcacctgttaaagggccaacagaactcttggttttacttttgtaattactgtacagaaaatttcaagagtgtttgagtgcttgtcatcaggtgttttccttaataagtagggatatgatcatttacaggaattatatatgaaaaaagtttttgaaatgtatttttgtgatgtgctatgttgaggggaaaccaaatatttatgattttaaaacattcgtatgaaaacattgtacaatgtaatatgctcaactttctcaattttttgctaatttttctaagatacattaaaaatgttttatatttttttttaagtaaaatggacccagtaagaaaattaaaaataccagaacatacactttaaa

SEQ ID NO: 280 - DNA, 8119 bp, Homo sapiens
cgcggcgcagccgggtctcccgcgtgtaccacgccgtgacaggtgcagagtccgggctgaggacccacctgcagccgccgccgcgatgcccaccatgcggaggaccgtgtcggagatccgctcgcgcgccgaaggttatgagaagacagatgatgtttcagagaagacctcactggctgaccaggaggaagtaaggactattttcatcaaccagccccagctgacaaaattctgcaataaccatgtcagcactgcaaaatacaacataatcacattccttccaagatttctctactctcagttcagaagagctgctaattcattttttctctttattgcactgctgcagcaaatacctgatgtgtcaccaacaggtcgttatacaacactggttcctctcttatttattttagctgtggcagctatcaaagagataatagaagatattaaacgacataaagctgataatgcagtgaacaagaaacaaacgcaagttttgagaaatggtgcttgggaaattgtccactgggaaaaggtggcagtaggggagatagtgaaagtgaccaatggggaacatctcccagcagatctcatcagtctgtcctcaagtgagccccaagccatgtgctacattgaaacatccaacttagatggtgaaacaaacttgaaaattagacagggcttaccagcaacatcagatatcaaagacgttgacagtttgatgaggatttctggcagaattgagtgtgaaagtccaaacagacatctctacgattttgttggaaacataaggcttgatggacatggcaccgttccactgggagcagatcagattcttcttcgaggagctcagttgagaaatacacagtgggttcatggaatagttgtctacactggacatgacaccaagctgatgcagaattcaacaagtccaccacttaagctctcaaatgtggaacggattacaaatgtacaaattttgattttattttgtatcttaattgccatgtctcttgtctgttctgtgggctcagccatttggaatcgaaggcattctggaaaagactggtatctcaatctaaactatggtggcgctagtaattttggactgaatttcttgaccttcatcatccttttcaacaatctcattcctatcagcttattggttacattagaagttgtgaaatttacccaggcatacttcataaattgggatcttgacatgcactatgaacccacagacactgctgctatggctcgaacatctaatctgaatgaggaacttggccaggttaaatacatattttctgacaaaactggtactctgacatgcaatgtaatgcagtttaagaagtgcaccatagcgggagttgcttatggccatgtccctgaacctgaggattatggctgctctcctgatgaatggcagaactcacagtttggagatgaaaaaacatttagtgattcatcattgctggaaaatctccaaaataatcatccaactgcacctataatatgtgaatttcttacaatgatggcagtctgtcacacagcagtgccagagcgagaaggtgacaagattatttatcaagcagcatctccagatgagggagcattggtcagagcagccaagcaattgaattttgttttcactggaagaacacccgactcggtgattatagattcactggggcaggaagaaagatatgaattgctcaatgtcttggagtttaccagtgctaggaaaagaatgtcagtgattgttcgcactccatctggaaagttacgactctactgcaaaggagctgacactgtaatttatgatcgactggcagagacgtcaaaatacaaagaaattaccctaaaacatttagagcagtttgctacagaagggttaagaactttatgttttgctgtggctgagatttcagagagcgactttcaggagtggcgagcagtctatcagcgagcatctacatctgtgcagaacaggctactcaaactcgaagagagttatgagttgattgaaaagaatcttcagctacttggagcaacagccattgaggataaattacaagatcaagtgcctgaaaccatagaaacgctaatgaaagcagacatcaaaatctggatccttacaggggacaagcaagaaactgccattaacatcggacactcctgcaaactgttgaagaagaacatgggaatgattgttataaatgaaggctctcttgatggaacaagggaaactctcagtcgtcactgtactacccttggtgatgctctccggaaagagaatgattttgctcttataattgatgggaaaaccctcaaatatgccttaacctttggagtacgacagtatttcctggacttagctttgtcatgcaaagctgtcatttgctgtcgggtttctcctcttcaaaaatctgaagttgttgagatggttaagaaacaagtcaaagtcgtaacgcttgcaatcggtgatggagcaaatgatgtcagcatgatacagacagcgcacgttggtgttggtatcagtggcaatgaaggcctgcaggcagctaattcctctgactactccatagctcagttcaaatatttgaagaatttactgatgattcatggtgcctggaactataacagagtctccaagtgcatcttatactgcttctacaagaatatagtgctctatattatcgagatctggtttgcctttgttaatggcttttctggacagatcctctttgaaagatggtgtataggtctctataacgtgatgtttacagcaatgcctcctttaactcttggaatatttgagagatcatgcagaaaagagaacatgttgaagtaccctgaattatacaaaacatctcagaatgccctggacttcaacaccaaggttttctgggttcattgtttaaatggcctcttccactcagttattctgttttggtttccactaaaagcccttcagtatggtactgcatttggaaatgggaaaacctcggattatctgctactgggaaactttgtgtacacttttgtggtgataactgtgtgtttgaaagctggattggagacatcatattggacatggttcagccacatagcgatatgggggagcatcgcactctgggtggtgttttttggaatctactcatctctgtggcctgccattccgatggcccctgatatgtcaggagaggcagccatgttgttcagttctggagtcttttggatgggcttgttattcatccctgtggcatctctgctccttgatgtggtgtacaaggttatcaagaggactgcttttaaaacattggtcgatgaagttcaggagctggaggcaaaatctcaagacccaggagcagttgtacttggaaaaagcctgaccgagagggcgcaactgctcaagaacgtctttaagaagaaccacgtgaacttgtaccgctctgaatccttgcaacaaaatctgctccatgggtatgcgttctctcaagatgaaaatggaatcgtttcacagtctgaagtgataagagcatatgataccacgaaacagaggcccgacgaatggtgatggggagagcctgaaaggcaggctctgttacctctctaaggagagctaccaggttgtcaccgcagtctgctaaccaattccagtctggtccatgaagaggaaaggtagatctgagctcatctcgctgatggacattcagattcatgtatattatagacataagcactgtgcaactgtactgtaacaccatctcttttggatttttttaaggtatttgctaagtctttgtaaacggaaattgaaaatgacctggtatcttgccagagggctttcttaaacggagaataagtcagtattcttatgccattactgtggggctgtaactgactgtcagtttattggctgtaccacaaggtaaccaaccattaaaaaactctaaatgatatttagttaaagggactcttggtatccagacttagatttcaggatatgctgaaacaaaccagcattcttaaggaactgactcaccttcctgagcaaaatttctaaacaagcatttgtgtccaaaattgtcttgataaatgtttgccaaagaggttcagtaagtgtttttctagttcagtagtcatatgcccagaaatgtaagagaaagtttacttccagttccgctgtaagatctgcatgcctgactttccaaatgtaagagtgatttacaaaaatgaatatttcaaggcatttgctactaaaatcggtgatgttgcacctttggccttacaaatgcttctttgttgtttgtcgtgtttatttgttagaggacacacgtgttaatgtgactctgttgttatgacactgatttttcaaactatgtatgtttcaggtatttctgatgaagtttcatcatcatttagatttttctaaaaatctggctaatgcagtagattgagtgatgtcattttgtcttaaagtttttcctcttaagaaacatatgctacgtatttacgtgggatttccaaagcttctgttgcaatatttggaataacatgtcagataaatgcatgggcttttgtcctgtgttccagttcccactagagatgcctgtgtcttgtgtagcacacccagtgttatggtgactgccccctatactgaagactgaaaattatttcacagttcactcatcaaatagttcccaaaattcgtcacatgctgcttattgggacaaataggtagtacattttccccatttaaaaaatgcggattttactcaggccggtaactttacagtcagaggacacgttcatcatgagtagcttttgttagtatgttttaaaatgtatcttcagttcaattattttcagcatttacaagacatctgaaaatggctattttgctaccaacagtaaatgaaggggctgtttaaaaaccacaaccagttttctacactattttttaaataatactttcatttgaaaaaaaggaattagttttcagatacacttcagagattgaagcaaactatttgccttttactcaaaagcctgcttgcctttacatggacttaccagcaaaataggtagaactttctcttttaaaaaaagtcaactagaattgagaagaggtgattttttttcagatcgcttctcgagtttaatattttcacattcttttcaccctttttctcaatctagatttaaaattaggatatatgtcatttccttgtctgtatttgtagctccttagttaccagtatgcctctccattttctacaaataagaggttataacacatatacataattctaaccttaagggaacacacgtttacatactttacttcccaagcccttcctgtttggggtacagattgagagagtcatgaatcaacacatctagcaagaccacaggtgtaagagtctaagatcgtcttcaaaattctgaagtcccagtctttacctgtccagtgaatgaatattcagagcagcttttcctgggcttcccagtggtgatagctgaggtcaaaccacaaaaaataagaaagcaagagtgaaatgcacccctccagagaaacactttgtagtgtttaattctgttaatagagaagagctgcttctgtttgcgctcacttcatcagtggcacccttctgcagaattttaatataaaaacattatggatataatagaactggattttctgacttaaaaatgtaagttttattttaatcttgaaacgtggattgtttctgtggagctcttaaacatgagaagaatacttacggttgataatgtgtaacatgatctgaaatgtgactaatttgagcctctttgtcccatcgtcctgtttttgaattattgacattgtcagtctctttgcttcctgggtgagacttggggtttgagggacagggaatgaccttcttggtgaaacttaaaatataacattgcaattgcagtgactttacagtgttaaattagagaaaatagtctgattttttaaaccttccttaactggaaaaaagtcacatggttttaccaggattgaaataaacagtcaatgtgacttttaacatgtgtttttttgaaataaagggcacgtactcttcaattaaaaagttccttatagggactctggcaaatgctaacacagttgctttacaatgtttacaattcagacaatacgacttataatagaaaatcctcattcatttagcattgaaaagctggaagttgcttctttaatgttgaatagtatacagtggtattgagcatggactttctaaatgttttatatatacatataaaaatatattggtgtctcacacccagaaagatgttatattgtagatattattaggaaaacagtgtttctcaggaacgttgtaaattttaaatgatatatgtacttcccgtcctcccacctccactctgtgctctaatgtgagactgcttcagcagtgttgctaagttaatggaaaactttttctaatcaagtcaggtgaatgtgtattctgctaaataatgttagccatttacatgaattgtatggtcattaaatggaatcagtgattcctctttaatttccagaggggaaatgaattatggaaatcagtcagcattctgatcattaaattttatactttaattttgccgttcagcattctaaatatccaatgtgaaagtcacatgataatttgttttgcattgcgtgcactgtacaacacttacaacttgtcatttaaaatgttttctcgggaaatgaatgctagtcagaaagtaatagattgtattattcatagttttaaaattatgacaatgtcataattactacaaagctaaataatcgtgtttatttttgtgcagttgccctttgatagttcctggttttaaaacctattaagtgtataatcttacaaatagtcatctacaaaatttatggagaaagtgcccagcccattcacatcacatggaccaggaattcttttgtaaatgacttaaggtaacatcatgcagttcagtgcctaataaatgctttttaatgatgaacatttctataatgactcgtaagataccatagtctgatttttctcacattaaaataactgaagtcacttgtgtaacgtagttatactttgctgcattttaattaaccttcaacagctattaaagtggaatgtaagttaaattttgaaggaaaggaaataaatgttttccatatttcgtcttgatttactttctgtatgagaacagctgtgtttttgataggtttatggtttgcatgagttcatatttaaagtgatccaggccaatgcatggctattgctgtaaatcttgatgtttatttctgccttgtaaagttctatcacggcctacctggaatttaaaattcagtagacaaattaattggtcctctgcacaacttttttaataagtagattattttacaaagaaatttgaacaaatttaattgaatcttttgtttagcttgcctctaagaacttttcttaataaagctcccaaaacttctcagcaaataaatctcccttaagtaggaaagctagatttcatatttgcttactttgaattaacagcaactttccacaggtaaatctgttcttgcaaagatgtgagcagaatagttaaaaataatatttttatgtttcatggttctaaatggaagccataaatgcagtaaatactatctgttgtttaactactttaatcgtcattttttacattttcaagtttattaggttaagaaaaacagggcagccttggaaggcagctactacagaaaactgcagttttgcgttaaagataaagtagtattttcagctccctgaaaaaccattcctgctgaaactgctgtagaaattgtgaagctgcatgagtggagagtattgaatctgtggttatagtagttttctcaggtttgtttatcttgatgtttgatgcactgtgttttatagttattaaaattgagtaatattatttctatgcagtgttatgtgtcattggccttttgtgaatgtgcatgttttaaactgcaaattttaaacattttgtcctctaattgttattaaaaatgaaataaactttaccattactt

SEQ ID NO: 281 - DNA, 3365 bp, Homo sapiens
gagcgccaggaaggtagcgaggccagcgtcgccccgggactcgctgctcaagtctgtctattgcctgccgccacatccatcctagcagggccccgtcgcccaccaggcggacaaaagcggtccgctgaacaccatgcggccgctcggcgtgccgcccaggctctgctggtgagcgccgccaccccgcgcccaggtcccgcgagcccgcctgccgcgcacctcgccctgctcccagctctactccaggccccgtccgcccgggggcgccgcccaccgcgcctcgctcgggccgttgccgtctgcacccagaccctgagccgccgccgccggccatggaggtggcgcccgagcagccgcgctggatggcgcacccggccgtgctgaatgcgcagcaccccgactcacaccacccgggcctggcgcacaactacatggaacccgcgcagctgctgcctccagacgaggtggacgtcttcttcaatcacctcgactcgcagggcaacccctactatgccaaccccgctcacgcgcgggcgcgcgtctcctacagccccgcgcacgcccgcctgaccggaggccagatgtgccgcccacacttgttgcacagcccgggtttgccctggctggacgggggcaaagcagccctctctgccgctgcggcccaccaccacaacccctggaccgtgagccccttctccaagacgccactgcacccctcagctgctggaggccctggaggcccactctctgtgtacccaggggctgggggtgggagcgggggaggcagcgggagctcagtggcctccctcacccctacagcagcccactctggctcccaccttttcggcttcccacccacgccacccaaagaagtgtctcctgaccctagcaccacgggggctgcgtctccagcctcatcttccgcggggggtagtgcagcccgaggagaggacaaggacggcgtcaagtaccaggtgtcactgacggagagcatgaagatggaaagtggcagtcccctgcgcccaggcctagctactatgggcacccagcctgctacacaccaccccatccccacctacccctcctatgtgccggcggctgcccacgactacagcagcggactcttccaccccggaggcttcctggggggaccggcctccagcttcacccctaagcagcgcagcaaggctcgttcctgttcagaaggccgggagtgtgtcaactgtggggccacagccacccctctctggcggcgggacggcaccggccactacctgtgcaatgcctgtggcctctaccacaagatgaatgggcagaaccgaccactcatcaagcccaagcgaagactgtcggccgccagaagagccggcacctgttgtgcaaattgtcagacgacaaccaccaccttatggcgccgaaacgccaacggggaccctgtctgcaacgcctgtggcctctactacaagctgcacaatgttaacaggccactgaccatgaagaaggaagggatccagactcggaaccggaagatgtccaacaagtccaagaagagcaagaaaggggcggagtgcttcgaggagctgtcaaagtgcatgcaggagaagtcatcccccttcagtgcagctgccctggctggacacatggcacctgtgggccacctcccgcccttcagccactccggacacatcctgcccactccgacgcccatccacccctcctccagcctctccttcggccacccccacccgtccagcatggtgaccgccatgggctagggaacagatggacgtcgaggaccgggcactcccgggatgggtggaccaaacccttagcagcccagcatttcccgaaggccgacaccactcctgccagcccggctcggcccagcaccccctctcctggagggcgcccagcagcctgccagcagttactgtgaatgttccccaccgctgagaggctgcctccgcacctgaccgctgcccaggtggggtttcctgcatggacagttgtttggagaacaacaaggacaactttatgtagagaaaaggaggggacgggacagacgaaggcaaccatttttagaaggaaaaaggattaggcaaaaataatttattttgctcttgtttctaacaaggacttggagacttggtggtctgagctgtcccaagtcctccggttcttcctcgggattggcgggtccacttgccagggctctgggggcagatttgtggggacctcagcctgcaccctcttctcctctggcttccctctctgaaatagccgaactccaggctgggctgagccaaagccagagtggccacggcccagggagggtgagctggtgcctgctttgacgggccaggccctggagggcagagacaatcacgggcggtcctgcacagattcccaggccagggctgggtcacaggaaggaaacaacattttcttgaaaggggaaacgtctcccagatcgctcccttggctttgaggccgaagctgctgtgactgtgtccccttactgagcgcaagccacagcctgtcttgtcaggtggaccctgtaaatacatcctttttctgctaacccttcaaccccctcgcctcctactctgagacaaaagaaaaaatattaaaaaaatgcataggcttaactcgctgatgagttaattgttttatttttaaactctttttgggtccagttgattgtacgtagccacaggagccctgctatgaaaggaataaaacctacacacaaggttggagctttgcaattctttttggaaaagagctgggatcccacagccctagtatgaaagctgggggtggggaggggcctttgctgcccttggtttctgggggctggttggcatttgctggcctggcagggggtgaaggcaggagttgggggcaggtcaggaccaggacccagggagaggctgtgtccctgctggggtctcaggtccagctttactgtggctgtctggatccttcccaaggtacagctgtatataaacgtgtcccgagcttagattctgtatgcggtgacggcggggtgtggtggcctgtgaggggcccctggcccaggaggaggattgtgctgatgtagtgaccaagtgcaatatgggcgggcagtcgctgcagggagcaccacggccagaagtaacttattttgtactagtgtccgcataagaaaaagaatcggcagtattttctgtttttatgttttatttggcttgttttattttggattagtgaactaagttattgttaattatgtacaacatttatatattgtctgtaaaaaatgtatgctatcctcttattcctttaaagtgagtactgttaagaataataaaatactttttgtg

SEQ ID NO: 282 - DNA, 603 bp, Homo sapiens
gaggatgtccttaagttccttgcagcaggaatccacttaggtggcaccaaccttgacttccaaatgaaacaatacatttataaaaagaaatgtgacggcgtctatatcataaatctgaagaggacctgggagaagcttctgttggcagcttgtgccattgttgccattgaaaaccctgctgatgtccgcgtcatatcctccaggaatactggccagagggccatactgaagtttgctgctgccactggagccactccaattgctggccgcttcactcctggaatcttcactaaccagatccaggcaaccttccaggagccacagcatcttttctttactgattccagggctgacctgcctctcacagaggcatcttatgttaacttacataccattgctccacgtaatacagattctccgctgtgctatgtggacattgccatcccatgcaagaagggagctcactcagtgggtttgatgtggtggatgctggcctggaaacttctgcacatgtgtggcaccatttcctgtgaacacctgtgggaggggatgcctgatctcttcttctacagagatcctgaagagactgaaaaagaagagtaa

SEQ ID NO: 283 - protein, 323 aa, Homo sapiens
MARGPGLAPPPLRLPLLLLVLAAVTGHTAAQDNCTCPTNKMTVCSPDGPGGRCQCRALGSGMAVDCSTLTSKCLLLKARMSAPKNARTLVRPSEHALVDNDGLYDPDCDPEGRFKARQCNQTSVCWCVNSVGVRRTDKGDLSLRCDELVRTHHILIDLRHRPTAGAFNHSDLDAELRRLFRERYRLHPKFVAAVHYEQPTIQIELRQNTSQKAAGDVDIGDAAYYFERDIKGESLFQGRGGLDLRVRGEPLQVERTLIYYLDEIPPKFSMKRLTAGLIAVIVVVVVALVAGMAVLVITNRRKSGKYKKVEIKELGELRKEPSL

SEQ ID NO: 284 - protein, 1792 aa, Homo sapiens
MSCVHYKFSSKLNYDTVTFDGLHISLCDLKKQIMGREKLKAADCDLQITNAQTKEEYTDDNALIPKNSSVIVRRIPIGGVKSTSKTYVISRTEPAMATTKAIDDSSASISLAQLTKTANLAEANASEEDKIKAMMSQSGHEYDPINYMKKPLGPPPPSYTCFRCGKPGHYIKNCPTNGDKNFESGPRIKKSTGIPRSFMMEVKDPNMKGAMLTNTGKYAIPTIDAEAYAIGKKEKPPFLPEEPSSSSEEDDPIPDELLCLICKDIMTDAVVIPCCGNSYCDECIRTALLESDEHTCPTCHQNDVSPDALIANKFLRQAVNNFKNETGYTKRLRKQLPPPPPPIPPPRPLIQRNLQPLMRSPISRQQDPLMIPVTSSSTHPAPSISSLTSNQSSLAPPVSGNPSSAPAPVPDITATVSISVHSEKSDGPFRDSDNKILPAAALASEHSKGTSSIAITALMEEKGYQVPVLGTPSLLGQSLLHGQLIPTTGPVRINTARPGGGRPGWEHSNKLGYLVSPPQQIRRGERSCYRSINRGRHHSERSQRTQGPSLPATPVFVPVPPPPLYPPPPHTLPLPPGVPPPQFSPQFPPGQPPPAGYSVPPPGFPPAPANLSTPWVSSGVQTAHSNTIPTTQAPPLSREEFYREQRRLKEEEKKKSKLDEFTNDFAKELMEYKKIQKERRRSFSRSKSPYSGSSYSRSSYTYSKSRSGSTRSRSYSRSFSRSHSRSYSRSPPYPRRGRGKSRNYRSRSRSHGYHRSRSRSPPYRRYHSRSRSPQAFRGQSPNKRNVPQGETEREYFNRYREVPPPYDMKAYYGRSVDFRDPFEKERYREWERKYREWYEKYYKGYAAGAQPRPSANRENFSPERFLPLNIRNSPFTRGRREDYVGGQSHRSRNIGSNYPEKLSARDGHNQKDNTKSKEKESENAPGDGKGNKHKKHRKRRKGEESEGFLNPELLETSRKSREPTGVEENKTDSLFVLPSRDDATPVRDEPMDAESITFKSVSEKDKRERDKPKAKGDKTKRKNDGSAVSKKENIVKPAKGPQEKVDGERERSPRSEPPIKKAKEETPKTDNTKSSSSSQKDEKITGTPRKAHSKSAKEHQETKPVKEEKVKKDYSKDVKSEKLTTKEEKAKKPNEKNKPLDNKGEKRKRKTEEKGVDKDFESSSMKISKLEVTEIVKPSPKRKMEPDTEKMDRTPEKDKISLSAPAKKIKLNRETGKKIGSTENISNTKEPSEKLESTSSKVKQEKVKGKVRRKVTGTEGSSSTLVDYTSTSSTGGSPVRKSEEKTDTKRTVIKTMEEYNNDNTAPAEDVIIMIQVPQSKWDKDDFESEEEDVKSTQPISSVGKPASVIKNVSTKPSNIVKYPEKESEPSEKIQKFTKDVSHEIIQHEVKSSKNSASSEKGKTKDRDYSVLEKENPEKRKNSTQPEKESNLDRLNEQGNFKSLSQSSKEARTSDKHDSTRASSNKDFTPNRDKKTDYDTREYSSSKRRDEKNELTRRKDSPSRNKDSASGQKNKPREERDLPKKGTGDSKKSNSSPSRDRKPHDHKATYDTKRPNEETKSVDKNPCKDREKHVLEARNNKESSGNKLLYILNPPETQVEKEQITGQIDKSTVKPKPQLSHSSRLSSDLTRETDEAAFEPDYNESDSESNVSVKEEESSGNISKDLKDKIVEKAKESLDTAAVVQVGISRNQSHSSPSVSPSRSHSPSGSQTRSHSSSASSAESQDSKKKKKKKEKKKHKKHKKHKKHKKHAGTEVELEKSQKHKHKKKKSKKNKDKEKEKEKDDQKVKSVTV

SEQ ID NO: 285 - protein, 500 aa, Homo sapiens
MRNWLVLLCPCVLGAALHLWLRLRSPPPACASGAGPADQLALFPQWKSTHYDVVVGVLSARNNHELRNVIRSTWMRHLLQHPTLSQRVLVKFIIGAHGCEVPVEDREDPYSCKLLNITNPVLNQEIEAFSLSEDTSSGLPEDRVVSVSFRVLYPIVITSLGVFYDANDVGFQRNITVKLYQAEQEEALFIARFSPPSCGVQVNKLWYKPVEQFILPESFEGTIVWESQDLHGLVSRNLHKVTVNDGGGVLRVITAGEGALPHEFLEGVEGVAGGFIYTIQEGDALLHNLHSRPQRLIDHIRNLHEEDALLKEESSIYDDIVFVDVVDTYRNVPAKLLNFYRWTVETTSFNLLLKTDDDCYIDLEAVFNRIVQKNLDGPNFWWGNFRLNWAVDRTGKWQELEYPSPAYPAFACGSGYVISKDIVKWLASNSGRLKTYQGEDVSMGIWMAAIGPKRYQDSLWLCEKTCETGMLSSPQYSPWELTELWKLKERCGDPCRCQAR

SEQ ID NO: 286 - protein, 364 aa, Homo sapiens
MPRGRCRQQGPRIPIWAAANYANAHPWQQMDKASPGVAYTPLVDPWIERPCCGDTVCVRTTMEQKSTASGTCGGKPAERGPLAGHMPSSRPHRVDFCWVPGSDPGTFDGSPWLLDRFLAQLGDYMSFHFEHYQDNISRVCEILRRLTGRAQAWAAPYLDGDLPLPDDYELFCQDLKEVVQDPNSFAEYHAVVTCPLPLASSQLPVAPQLPVVRQYLARFLEGLALDMGTAPRSLPAAMATPAVSGSNSVSRSALFEQQLTKESTPGPKEPPVLPSSTCSSKPGPVEPASSQPEEAAPTPVPRLSESANPPAQRPDPAHPGGPKPQKTEEEVLETEGDQEVSLGTPQEVVEAPETPGEPPLSPGF

SEQ ID NO: 287 - protein, 120 aa, Homo sapiens
MKVSEAALSLLVLILIITSASRSQPKVPEWVNTPSTCCLKYYEKVLPRRLVVGYRKALNCHLPAIIFVTKRNREVCTNPNDDWVQEYIKDPNLPLLPTRNLSTVKIITAKNGQPQLLNSQ

SEQ ID NO: 288 - protein, 1270 aa, Homo sapiens
MGDVKNFLYAWCGKRKMTPSYEIRAVGNKNRQKFMCEVQVEGYNYTGMGNSTNKKDAQSNAARDFVNYLVRINEIKSEEVPAFGVASPPPLTDTPDTTANAEGDLPTTMGGPLPPHLALKAENNSEVGASGYGVPGPTWDRGANLKDYYSRKEEQEVQATLESEEVDLNAGLHGNWTLENAKARLNQYFQKEKIQGEYKYTQVGPDHNRSFIAEMTIYIKQLGRRIFAREHGSNKKLAAQSCALSLVRQLYHLGVVEAYSGLTKKKEGETVEPYKVNLSQDLEHQLQNIIQELNLEILPPPEDPSVPVALNIGKLAQFEPSQRQNQVGVVPWSPPQSNWNPWTSSNIDEGPLAFATPEQISMDLKNELMYQLEQDHDLQAILQERELLPVKKFESEILEAISQNSVVIIRGATGCGKTTQVPQFILDDFIQNDRAAECNIVVTQPRRISAVSVAERVAFERGEEPGKSCGYSVRFESILPRPHASIMFCTVGVLLRKLEAGIRGISHVIVDEIHERDINTDFLLVVLRDVVQAYPEVRIVLMSATIDTSMFCEYFFNCPIIEVYGRTYPVQEYFLEDCIQMTHFVPPPKDKKKKDKDDDGGEDDDANCNLICGDEYGPETRLSMSQLNEKETPFELIEALLKYIETLNVPGAVLVFLPGWNLIYTMQKHLEMNPHFGSHRYQILPLHSQIPREEQRKVFDPVPVGVTKVILSTNIAETSITINDVVYVIDSCKQKVKLFTAHNNMTNYATVWASKTNLEQRKGRAGRVRPGFCFHLCSRARFERLETHMTPEMFRTPLHEIALSIKLLRLGGIGQFLAKAIEPPPLDAVIEAEHTLRELDALDANDELTPLGRILAKLPIEPRFGKMMIMGCIFYVGDAICTIAAATCFPEPFINEGKRLGYIHRNFAGNRFSDHVALLSVFQAWDDARMGGEEAEIRFCEHKRLNMATLRMTWEAKVQLKEILINSGFPEDCLLTQVFTNTGPDNNLDVVISLLAFGVYPNVCYHKEKRKILTTEGRNALIHKSSVNCPFSSQDMKYPSPFFVFGEKIRTRAISAKGMTLVTPLQLLLFASKKVQSDGQIVLVDDWIKLQISHEAAACITGLRAAMEALVVEVTKQPAIISQLDPVNERMLNMIRQISRPSAAGINLMIGSTRYGDGPRPPKMARYDNGSGYRRGGSSYSGGGYGGGYSSGGYGSGGYGGSANSFRAGYGAGVGGGYRGVSRGGFRGNSGGDYRGPSGGYRGSGGFQRGGGRGAYGTGYFGQGRGGGGY

SEQ ID NO: 289 - protein, 393 aa, Homo sapiens
MKRTRDEVDATLQIAKLNAAELLPAVHCLGFGPGASGAAAGDFCLLELEPTLCQQLEDGHSLVIRGDKDEQAVLCSKDKTYDLKIADTSNMLLFIPGCKTPDQLKKEDSHCNIIHTEIFGFSNNYWELRRRRPKLKKLKKLLMENPYEGPDSQKEKDSNSSKYTTEDLLDQIQASEEEIMTQLQVLNACKIGGYWRILEFDYEMKLLNHVTQLVDSESWSFGKVPLNTCLQELGPLEPEEMIEHCLKCYGKKYVDEGEVYFELDADKICRAAARMLLQNAVKFNLAEFQEVWQQSVPEGMVTSLDQLKGLALVDRHSRPEIIFLLKVDDLPEDNQERFNSLFSLREKWTEEDIAPYIQDLCGEKQTIGALLTKYSHSSMQNGVKVYNSRRPIS

SEQ ID NO: 290 - protein, 310 aa, Homo sapiens
MSQRDTLVHLFAGGCGGTVGAILTCPLEVVKTRLQSSSVTLYISEVQLNTMAGASVNRVVSPGPLHCLKVILEKEGPRSLFRGLGPNLVGVAPSRAIYFAAYSNCKEKLNDVFDPDSTQVHMISAAMAGFTAITATNPIWLIKTRLQLDARNRGERRMGAFECVRKVYQTDGLKGFYRGMSASYAGISETVIHFVIYESIKQKLLEYKTASTMENDEESVKEASDFVGMMLAAATSKTCATTIAYPHVVRTRLREEGTKYRSFFQTLSLLVQEEGYGSLYRGLTTHLVRQIPNTAIMMATYELVVYLLNG

SEQ ID NO: 291 - protein, 582 aa, Homo sapiens
AGQRLRPVPAPRSSAEEAARPGQLRLGIRRGEAELAKLAPSGVMVPGARGGGALARAAGRGLLALLLAVSAPLRLQAEELGDGCGHLVTYQDSGTMTSKNYPGTYPNHTVCEKTITVPKGKRLILRLGDLDIESQTCASDYLLFTSSSDQYGPYCGSMTVPKELLLNTSEVTVRFESGSHISGRGFLLTYASSDHPDLITCLERASHYLKTEYSKFCPAGCRDVAGDISGNMVDGYRDTSLLCKAAIHAGIIADELGGQISVLQRKGISRYEGILANGVLSRDGSLSDKRFLFTSNGCSRSLSFEPDGQIRASSSWQSVNESGDQVHWSPGQARLQDQGPSWASGDSSNNHKPREWLEIDLGEKKKITGIRTTGSTQSNFNFYVKSFVMNFKNNNSKWKTYKGIVNNEEKVFQGNSNFRDPVQNNFIPPIVARYVRVVPQTWHQRIALKVELIGCQITQGNDSLVWRKTSQSTSVSTKKEDETITRPIPSEETSTGINITTVAIPLVLLVVLVFAGMGIFAAFRKKKKKGSPYGSAEAQKTDCWKQIKYPFARHQSAEFTISYDNEKEMTQKLDLITSDMAG

SEQ ID NO: 292 - protein, 429 aa, Homo sapiens
MAVAVGRPSNEELRNLSLSGHVGFDSLPDQLVNKSTSQGFCFNILCVGETGIGKSTLMDTLFNTKFESDPATHNEPGVRLKARSYELQESNVRLKLTIVDTVGFGDQINKDDSYKPIVEYIDAQFEAYLQEELKIKRSLFNYHDTRIHACLYFIAPTGHSLKSLDLVTMKKLDSKVNIIPIIAKADTIAKNELHKFKSKIMSELVSNGVQIYQFPTDEETVAEINATMSVHLPFAVVGSTEEVKIGNKMAKARQYPWGVVQVENENHCDFVKLREMLIRVNMEDLREQTHTRHYELYRRCKLEEMGFKDTDPDSKPFSLQETYEAKRNEFLGELQKKEEEMRQMFVMRVKEKEAELKEAEKELHEKFDLLKRTHQEEKKKVEDKKKELEEEVNNFQKKKAAAQLLQSQAQQSGAQQTKKDKDKKNASFT

SEQ ID NO: 293 - protein, 571 aa, Homo sapiens
MTILPKKKPPPPDADPANEPPPPGPMPPAPRRGGGVGVGGGGTGVGGGDRDRDSGVVGARPRASPPPQGPLPGPPGALHRWALAVPPGAVAGPRPQQASPPPCGGPGGPGGGPGDALGAAAAGVGAAGVVVGVGGAVGVGGCCSGPGHSKRRRQAPGVGAVGGGSPEREEVGAGYNSEDEYEAAAARIEAMDPATVEQQEHWFEKALRDKKGFIIKQMKEDGACLFRAVADQVYGDQDMHEVVRKHCMDYLMKNADYFSNYVTEDFTTYINRKRKNNCHGNHIEMQAMAEMYNRPVEVYQYSTGTSAVEPINTFHGIHQNEDEPIRVSYHRNIHYNSVVNPNKATIGVGLGLPSFKPGFAEQSLMKNAIKTSEESWIEQQMLEDKKRATDWEATNEAIEEQVARESYLQWLRDQEKQARQVRGPSQPRKASATCSSATAAASSGLEEWTSRSPRQRSSASSPEHPELHAELGMKPPSPGTVLALAKPPSPCAPGTSSQFSAGADRATSPLVSLYPALECRALIQQMSPSAFGLNDWDDDEILASVLAVSQQEYLDSMKKNKVHRDPPPDKS

SEQ ID NO: 294 - protein, 724 aa, Homo sapiens
MASWGGEKRGGAEGSPKLAVYATRKTRSVRSQEDQWYLGYPGDQWSSGFSYSWWKNSVGSESKHGEGALDQPQHDVRLEDLGELHRAARSGDVPGVEHVLAPGDTGVDKRDRKKSIQQLVPEYKEKQTPESLPQNNNPDWHPTNLTLSDETCQRSKNLKVGDKSPSVSPSMPENQSATKELGQMNLTEREKMDTGVVLLSGNDTLHDLCQSQLPENKESKEAEQDLELTSEEEQERLKGCENKQPQKTSQEPEMAKDCDREDIPIYPVLPHVQKSEEMWIEQGKLEWKNQLKLVINELKQRFGEIYEKYKIPACPEEEPLLDNSTRGTDVKDIPFNLTNNIPGCEEEDASEISVSVVFETFPEQKEPSLKNIIHPYYHPYSGSQEHVCQSSSKLHLHENKLDCDNDNKLGIGHIFSTDNNFHNDASTKKARNPEVVTVEMKEDQEFDLQMTKNMNQNSDSGSTNNYKSLKPKLENLSSLPPDSDRTSEVYLHEELQQDMQKFKNEVNTLEEEFLALKKENVQLHKEVEEEMEKHRSNSTELSGTLTDGTTVGNDDDGLNQQIPRKENEEHDRPADKTANEKNKVKNQIYPEADFADSMEPSEIASEDCELSHSVYENFMLLEQLRMEYKDSASLPRIQDTFCLCEHLLKLKNNHCDQLTVKLKQMENMVSVLQNELSETKKTKLQLELQKIEWEKELYDLRLALKQENGRKEMPICCIIKIVNS

SEQ ID NO: 295 - protein, 253 aa, Homo sapiens
MWPPGSASQPPPSPAAATGLHPAARPVSLQCRLSMCPARSLLLVATLVLLDHLSLARNLPVATPDPGMFPCLHHSQNLLRAVSNMLQKARQTLEFYPCTSEEIDHEDITKDKTSTVEACLPLELTKNESCLNSRETSFITNGSCLASRKTSFMMALCLSSIYEDLKMYQVEFKTMNAKLLMDPKRQIFLDQNMLAVIDELMQALNFNSETVPQKSSLEEPDFYKTKIKLCILLHAFRIRAVTIDRVMSYLNAS

SEQ ID NO: 296 - protein, 241 aa, Homo sapiens
MFYSGLLTEGGRKETDMREAASLRQQRRMKQAVQFIHKDSADLLPLDGLKKLGSSKDMQPHNILQRRLMETNLSKLRSGPRVPWASKTNKLNQAKSEGLKKSEEDDMILVSCQCAGKDVKALVDTGCLYNLISLACVDRLGLKEHVKSHKHEGEKLSLPRHLKVVGQIEHLVITLGSLRLDCPAAVVDDNEKNLSLGLQTLRSLKCIINLDKHRLIMGKTDKEEIPFVETVSLNEDNTSEA

SEQ ID NO: 297 - protein, 118 aa, Homo sapiens
MCDKEFMWALKNGDLDEVKDYVAKGEDVNRTLEGGRKPLHYAADCGQLEILEFLLLKGADINAPDKHHITPLLSAVYEGHVSCVKLLLSKGADKTVKGPDGLTAFEATDNQAIKALLQ

SEQ ID NO: 298 - protein, 2322 aa, Homo sapiens
MQSGPRPPLPAPGLALALTLTMLARLASAASFFGENHLEVPVATALTDIDLQLQFSTSQPEALLLLAAGPADHLLLQLYSGRLQVRLVLGQEELRLQTPAETLLSDSIPHTVVLTVVEGWATLSVDGFLNASSAVPGAPLEVPYGLFVGGTGTLGLPYLRGTSRPLRGCLHAATLNGRSLLRPLTPDVHEGCAEEFSASDDVALGFSGPHSLAAFPAWGTQDEGTLEFTLTTQSRQAPLAFQAGGRRGDFIYVDIFEGHLRAVVEKGQGTVLLHNSVPVADGQPHEVSVHINAHRLEISVDQYPTHTSNRGVLSYLEPRGSLLLGGLDAEASRHLQEHRLGLTPEATNASLLGCMEDLSVNGQRRGLREALLTRNMAAGCRLEEEEYEDDAYGHYEAFSTLAPEAWPAMELPEPCVPEPGLPPVFANFTQLLTISPLVVAEGGTAWLEWRHVQPTLDLMEAELRKSQVLFSVTRGARHGELELDIPGAQARKMFTLLDVVNRKARFIHDGSEDTSDQLVLEVSVTARVPMPSCLRRGQTYLLPIQVNPVNDPPHIIFPHGSLMVILEHTQKPLGPEVFQAYDPDSACEGLTFQVLGTSSGLPVERRDQPGEPATEFSCRELEAGSLVYVHRGGPAQDLTFRVSDGLQASPPATLKVVAIRPAIQIHRSTGLRLAQGSAMPILPANLSVETNAVGQDVSVLFRVTGALQFGELQKQGAGGVEGAEWWATQAFHQRDVEQGRVRYLSTDPQHHAYDTVENLALEVQVGQEILSNLSFPVTIQRATVWMLRLEPLHTQNTQQETLTTAHLEATLEEAGPSPPTFHYEVVQAPRKGNLQLQGTRLSDGQGFTQDDIQAGRVTYGATARASEAVEDTFRFRVTAPPYFSPLYTFPIHIGGDPDAPVLTNVLLVVPEGGEGVLSADHLFVKSLNSASYLYEVMERPRHGRLAWRGTQDKTTMVTSFTNEDLLRGRLVYQHDDSETTEDDIPFVATRQGESSGDMAWEEVRGVFRVAIQPVNDHAPVQTISRIFHVARGGRRLLTTDDVAFSDADSGFADAQLVLTRKDLLFGSIVAVDEPTRPIYRFTQEDLRKRRVLFVHSGADRGWIQLQVSDGQHQATALLEVQASEPYLRVANGSSLVVPQGGQGTIDTAVLHLDTNLDIRSGDEVHYHVTAGPRWGQLVRAGQPATAFSQQDLLDGAVLYSHNGSLSPRDTMAFSVEAGPVHTDATLQVTIALEGPLAPLKLVRHKKIYVFQGEAAEIRRDQLEAAQEAVPPADIVFSVKSPPSAGYLVMVSRGALADEPPSLDPVQSFSQEAVDTGRVLYLHSRPEAWSDAFSLDVASGLGAPLEGVLVELEVLPAAIPLEAQNFSVPEGGSLTLAPPLLRVSGPYFPTLLGLSLQVLEPPQHGALQKEDGPQARTLSAFSWRMVEEQLIRYVHDGSETLTDSFVLMANASEMDRQSHPVAFTVTVLPVNDQPPILTTNTGLQMWEGATAPIPAEALRSTDGDSGSEDLVYTIEQPSNGRVVLRGAPGTEVRSFTQAQLDGGLVLFSHRGTLDGGFRFRLSDGEHTSPGHFFRVTAQKQVLLSLKGSQTLTVCPGSVQPLSSQTLRASSSAGTDPQLLLYRVVRGPQLGRLFHAQQDSTGEALVNFTQAEVYAGNILYEHEMPPEPFWEAHDTLELQLSSPPARDVAATLAVAVSFEAACPQRPSHLWKNKGLWVPEGQRARITVAALDASNLLASVPSPQRSEHDVLFQVTQFPSRGQLLVSEEPLHAGQPHFLQSQLAAGQLVYAHGGGGTQQDGFHFRAHLQGPAGASVAGPQTSEAFAITVRDVNERPPQPQASVPLRLTRGSRAPISRAQLSVVDPDSAPGEIEYEVQRAPHNGFLSLVGGGLGPVTRFTQADVDSGRLAFVANGSSVAGIFQLSMSDGASPPLPMSLAVDILPSAIEVQLRAPLEVPQALGRSSLSQQQLRVVSDREEPEAAYRLIQGPQYGHLLVGGRPTSAFSQFQIDQGEVVFAFTNFSSSHDHFRVLALARGVNASAVVNVTVRALLHVWAGGPWPQGATLRLDPTVLDAGELANRTGSVPRFRLLEGPRHGRVVRVPRARTEPGGSQLVEQFTQQDLEDGRLGLEVGRPEGRAPGPAGDSLTLELWAQGVPPAVASLDFATEPYNAARPYSVALLSVPEAARTEAGKPESSTPTGEPGPMASSPEPAVAKGGFLSFLEANMFSVIIPMCLVLLLLALILPLLFYLRKRNKTGKHDVQVLTAKPRNGLAGDTETFRKVEPGQAIPLTAVPGQGPPPGGQPDPELLQFCRTPNPALKNGQYWV

SEQ ID NO: 299 - protein, 599 aa, Homo sapiens
MSGPCGEKPVLEASPTMSLWEFEDSHSRQGTPRPGQELAAEEASALELQMKVDFFRKLGYSSTEIHSVLQKLGVQADTNTVLGELVKHGTATERERQTSPDPCPQLPLVPRGGGTPKAPNLEPPLPEEEKEGSDLRPVVIDGSNVAMSHGNKEVFSCRGILLAVNWFLERGHTDITVFVPSWRKEQPRPDVPITDQHILRELEKKKILVFTPSRRVGGKRVVCYDDRFIVKLAYESDGIVVSNDTYRDLQGERQEWKRFIEERLLMYSFVNDKFMPPDDPLGRHGPSLDNFLRKKPLTLEHRKQPCPYGRKCTYGIKCRFFHPERPSCPQRSVADELRANALLSPPRAPSKDKNGRRPSPSSQSSSLLTESEQCSLDGKKLGAQASPGSRQEGLTQTYAPSGRSLAPSGGSGSSFGPTDWLPQTLDSLPYVSQDCLDSGIGSLESQMSELWGVRGGGPGEPGPPRAPYTGYSPYGSELPATAAFSAFGRAMGAGHFSVPADYPPAPPAFPPREYWSEPYPLPPPTSVLQEPPVQSPGAGRSPWGRAGSLAKEQASVYTKLCGVFPPHLVEAVMGRFPQLLDPQQLAAEILSYKSQHPSE

SEQ ID NO: 300 - protein, 816 aa, Homo sapiens
MVYSRRGSLGSRLLLLWLLLAYWKAGSGQLHYSIPEEAKHGTFVGRIAQDLGLELAELVPRLFRVASKGRGDLLEVNLQNGILFVNSRIDREELCRRRAECSIHLEVIVDRPLQVFHVEVAVKDINDNPPRFSRQEQRLFILESRMPDSRFPLEGASDLDIGANAQLRYRLNPNEYFDLDVKTNEEETNFLELVLRKSLDREETQEHRLLVIATDGGKPELTGTVQLLINVLDANDNAPEFDKSIYNVRLLENAPSGTLVIKLNASDADEGINKEIVYFFSNLVLDDVKSKFIINSNTGEIKVNGELDYEDYNSYEINIDAMDKSTFPLSGHCKVVVKLLDVNDNTPEMAITTLFLPVKEDAPLSTVIALISVSDRDSGANGQVTCSLMPHVPFKLVSTFKNYYSLVLDSALDRESVSVYELVVTARDGGSPSLWATASVSVEVADVNDNAPAFAQPQYTVFVKENNPPGCHIFTVSARDADAQENALVSYSLVERRVGERPLSSYVSVHAESGKVYALQPLDHEEVELLQFQVSARDAGVPPLGSNVTLQVFVLDENDNAPALLVPRVGGTGGAVSELVPRSVGAGHVVAKVRAVDPDSGYNAWLSYELQPAPGSARIPFRVGLYTGEISTTRSLDETEAPRHRLLVLVKDHGEPPLTATATVLVSLVESGQAPKASSRASAGAVGPEAALVDVNVYLIIAICAVSSLLVLTLLLYTALRCSAQPTEAVCTRGKPTLLCSSAVGSWSYSQQRRQRVCSGEAPPKTDLMAFSPSLPQGPTSTDNVSFLILTSIFPSQFSNIKCHIHPLFLYLKIMS

SEQ ID NO: 301 - protein, 393 aa, Homo sapiens
MLRRLLERPCTLALLVGSQLAVMMYLSLGGFRSLSALFGRDQGPTFDYSHPRDVYSNLSHLPGAPGGPPAPQGLPYCPERSPLLVGPVSVSFSPVPSLAEIVERNPRVEPGGRYRPAGCEPRSRTAIIVPHRAREHHLRLLLYHLHPFLQRQQLAYGIYVIHQAGNGTFNRAKLLNVGVREALRDEEWDCLFLHDVDLLPENDHNLYVCDPRGPRHVAVAMNKFGYSLPYPQYFGGVSALTPDQYLKMNGFPNEYWGWGGEDDDIATRVRLAGMKISRPPTSVGHYKMVKHRGDKGNEENPHRFDLLVRTQNSWTQDGMNSLTYQLLARELGPLYTNITADIGTDPRGPRAPSGPRYPPGSSQAFRQEMLQRRPPARPGPLSTANHTALRGSH

SEQ ID NO: 302 - protein, 227 aa, Homo sapiens
MTDFKLGIVRLGRVAGKTKYTLIDEQDIPLVESYSFEARMEVDADGNGAKIFAYAFDKNRGRGSGRLLHELLWERHRGGVAPGFQVVHLNAVTVDNRLDNLQLVPWGWRPKAEETSSKQREQSLYWLAIQQLPTDPIEEQFPVLNVTRYYNANGDVVEEEENSCTYYECHYPPCTVIEKQLREFNICGRCQVARYCGSQCQQKDWPAHKKHCRERKRPFQHELEPER

SEQ ID NO: 303 - protein, 491 aa, Homo sapiens
MPGARDALCHQALQLLAELCARGALEHDSCQDFIYHLRDRARPRLRDPDISVSLLTLVVTACGLALFGVSLFVSWKLCWVPWRERGLPSGSKDNNQEPLNYMDTETNEQENSEDFLDPPTPCPDSSMKISHTSPDIPLSTQTGIQENCAHGVRVQRQVTEPTSSARHNSIRRQLNLSNPDFNIQQLQKQEQLTGIGRIKPELYKQRSLDNDDGRRSNSKACGKLNFILKYDCDLEQLIVKIHKAVNLPAKDFSGTSDPYVKIYLLPDRKTKHQTKVHRKTLNPVFDEVFLFPVPYNDLEARKLHFSVYDFDRFSRHDLIGQVVVDHFLDLADFPRECILWKDIEYVTNDNVDLGELMFSLCYLPTAGRLTITIIKARNLKAMDITGASDPYVKVSLMCDGRRLKKRKTSTKRNTLNPVYNEAIVFDVPPENIDQIHLSIAVMDYDRVGHNEIIGVCQVGNEAERLGRDHWSEMLSYPRKPIAHWHSLVEKR

SEQ ID NO: 304 - protein, 410 aa, Homo sapiens
MAKDAGLIEANGELKVFIDQNLSPGKGVVSLVAVHPSTVNPLGKQLLPKTFGQSNVNIAQQVVIGTPQRPAASNTLVVGSPHTPSTHFASQNQPSDSSPWSAGKRNRKGEKNGKGLRHFSMKVCEKVQRKGTTSYNEVADELVAEFSAADNHILPNESAYDQKNIRRRVYDALNVLMAMNIISKEKKEIKWIGLPTNSAQECQNLEVERQRRLERIKQKQSQLQELILQQIAFKNLVQRNRHAEQQASRPPPPNSVIHLPFIIVNTSKKTVIDCSISNDKFEYLFNFDNTFEIHDDIEVLKRMGMACGLESGSCSAEDLKMARSLVPKALEPYVTEMAQGTVGGVFITTAGSTSNGTRFSASDLTNGADGMLATSSNGSQYSGSRVETPVSYVGEDDEEDDDFNENDEDD

SEQ ID NO: 305 - protein, 914 aa, Homo sapiens
MENWPTPSELVNTGFQSVLSQGNKKPQNRKEKEEKVEKRSNSDSKENRETKLNGPGENVSEDEAQSSNQRKRANKHKWVPLHLDVVRSESQERPGSRNSSRCQPEANKPTHNNRRNDTRSWKRDREKRDDQDDVSSVRSEGGNIRGSFRGRGRGRGRGRGRGRGNPRLNFDYSYGYQEHGERTDQPFQTELNTSMMYYYDDGTGVQVYPVEEALLKEYIKRQIEYYFSVENLERDFFLRGKMDEQGFLPISLIAGFQRVQALTTNLNLILEALKDSTEVEIVDEKMRKKIEPEKWPIPGPPPRSVPPTDFSQLIDCPEFVPGQAFCSHTESAPNSPRIGSPLSPKKNSETSILQAMSRGLSTSLPDLDSEPWIEVKKRHQPAPVKLRESVSVPEGSLNQLCSSEEPEQEELDFLFDEEIEQIGRKNTFTDWSDNDSDYEIDDQDLNKILIVTQTPPYVKKHPGGDRTGTHMSRAKITSELAKVINDGLYYYEQDLWMEEDENKHTAIKQEVENFKKLNLISKEQFENLTPELPFEPNQEVPVAPSQSRQGGVQGVLHIPKKDLTDELAQKLFDVSEITSAAMVHSLPTAVPESPRIHPTRTPKTPRTPRLQDPNKTPRFYPVVKEPKAIDVKSPRKRKTRHSTNPPLECHVGWVMDSRDRGPGTSSVSTSNASPSEGAPLAGSYGCTPHSFPKFQHPSHELLKENGFTQQVYHKYRRRCLSERKRLGIGQSQEMNTLFRFWSFFLRDHFNKKMYEEFRQLAWEDAKENYRYGLECLFRFYSYGLEKKFRREIFQDFQEETKKDYESGQLYGLEKFWAYLKYSQSKTQSIDPKLQEYLCSFKRLEDFRVDPPISDEFGRKRHSSTSGEESNRHRLPPNSSTKPPNAAKPTSTSELQVPINSPRRNISPESSDNSH

SEQ ID NO: 306 - protein, 480 aa, Homo sapiens
MSAEVIHQVEEALDTDEKEMLLFLCRDVAIDVVPPNVRDLLDILRERGKLSVGDLAELLYRVRRFDLLKRILKMDRKAVETHLLRNPHLVSDYRVLMAEIGEDLDKSDVSSLIFLMKDYMGRGKISKEKSFLDLVVELEKLNLVAPDQLDLLEKCLKNIHRIDLKTKIQKYKQSVQGAGTSYRNVLQAAIQKSLKDPSNNFRLHNGRSKEQRLKEQLGAQQEPVKKSIQESEAFLPQSIPEERYKMKSKPLGICLIIDCIGNETELLRDTFTSLGYEVQKFLHLSMHGISQILGQFACMPEHRDYDSFVCVLVSRGGSQSVYGVDQTHSGLPLHHIRRMFMGDSCPYLAGKPKMFFIQNYVVSEGQLEDSSLLEVDGPAMKNVEFKAQKRGLCTVHREADFFWSLCTADMSLLEQSHSSPSLYLQCLSQKLRQERKRPLLDLHIELNGYMYDWNSRVSAKEKYYVWLQHTLRKKLILSYT

SEQ ID NO: 307 - protein, 401 aa, Homo sapiens
MMGLGNGRRSMKSPPLVLAALVACIIVLGFNYWIASSRSVDLQTRIMELEGRVRRAAAERGAVELKKNEFQGELEKQREQLDKIQSSHNFQLESVNKLYQDEKAVLVNNITTGERLIRVLQDQLKTLQRNYGRLQQDVLQFQKNQTNLERKFSYDLSQCINQMKEVKEQCEERIEEVTKKGNEAVASRDLSENNDQRQQLQALSEPQPRLQAAGLPHTEVPQGKGNVLGNSKSQTPAPSSEVVLDSKRQVEKEETNEIQVVNEEPQRDRLPQEPGREQVVEDRPVGGRGFGGAGELGQTPQVQAALSVSQENPEMEGPERDQLVIPDGQEEEQEAAGEGRNQQKLRGEDDYNMDENEAESETDKQAALAGNDRNIDVFNVEDQKRDTINLLDQREKRNHTL

SEQ ID NO: 308 - protein, 305 aa, Homo sapiens
MGRPRPRAAKTWMFLLLLGGAWAACGSLDLLTKLYAENLPCVHLNPQWPSQPSHCPRGWRSNPLPPAAGHSRAQEDKVLGGHECQPHSQPWQAALFQGQQLLCGGVLVGGNWVLTAAHCKKPKYTVRLGDHSLQNKDGPEQEIPVVQSIPHPCYNSSDVEDHNHDLMLLQLRDQASLGSKVKPISLADHCTQPGQKCTVSGWGTVTSPRENFPDTLNCAEVKIFPQKKCEDAYPGQITDGMVCAGSSKGADTCQGDSGGPLVCDGALQGITSWGSDPCGRSDKPGVYTNICRYLDWIKKIIGSKG

SEQ ID NO: 309 - protein, 295 aa, Homo sapiens [sequence omitted]

SEQ ID NO: 310 - protein, 566 aa, Homo sapiens
MDLHRAAFKMENSSYLPNPLASPALMVLASTAEASRDASIPCQQPRPFGVPVSVDKDVHIPFTNGSYTFASMYHRQGGVPGTFANRDFPPSLLHLHPQFAPPNLDCTPISMLNHSGVGAFRPFASTEDRESYQSAFTPAKRLKNCHDTESPHLRFSDADGKEYDFGTQLPSSSPGSLKVDDTGKKIFAVSGLISDREASSSPEDRNDRCKKKAAALFDSQAPICPICQVLLRPSELQEHMEQELEQLAQLPSSKNSLLKDAMAPGTPKSLLLSASIKREGESPTASPHSSATDDLHHSDRYQTFLRVRANRQTRLNARIGKMKRRKQDEGQREGSCMAEDDAVDIEHENNNRFEEYEWCGQKRIRATTLLEGGFRGSGFIMCSGKENPDSDADLDVDGDDTLEYGKPQYTEADVIPCTGEEPGEAKEREALRGAVLNGGPPSTRITPEFSKWASDEMPSTSNGESSKQEAMQKTCKNSDIEKITEDSAVTTFEALKARVRELERQLSRGDRYKCLICMDSYSMPLTSIQCWHVHCEECWLRTLGAKKLCPQCNTITAPGDLRRIYL

SEQ ID NO: 311 - protein, 451 aa, Homo sapiens
MAEGAQPHQPPQLGPGAAARGMKRESELELPVPGAGGDGADPGLSKRPRTEEAAADGGGGMQNEPLTPGYHGFPARDSQGNQEPTTTPDAMVQPFTTIPFPPPPQNGIPTEYGVPHTQDYAGQTGEHNLTLYGSTQAHGEQSSNSPSTQNGSLTQTEGGAQTDGQQSQTQSSENSESKSTPKRLHVSNIPFRFRDPDLRQMFGQFGKILDVEIIFNERGSKGFGFVTFENSADADRAREKLHGTVVEGRKIEVNNATARVMTNKKMVTPYANGWKLSPVVGAVYGPELYAASSFQADVSLGNDAAVPLSGRGGINTYIPLISLPLVPGFPYPTAATTAAAFRGAHLRGRGRTVYGAVRAVPPTAIPAYPGVVYQDGFYGADLYGGYAAYRYAQPATATAATAAAAAAAAYSDGYGRVYTADPYHALAPAASYGVGAVASLYRGGYSRFAPY

SEQ ID NO: 312 - protein, 259 aa, Homo sapiens
MDRSAEFRKWKAQCLSKADLSRKGSVDEDVVELVQFLNMRDQFFTTSSCAGRILLLDRGINGFEVQKQNCCWLLVTHKLCVKDDVIVALKKANGDATLKFEPFVLHVQCRQLQDAQILHSMAIDSGFRNSGITVGKRGKTMLAVRSTHGLEVPLSHKGKLMVTEEYIDFLLNVANQKMEENKKRIERFYNCLQHALERETMTNLHPKIKEKNNSSYIHKKKRNPEKTRAQCITKESDEELENDDDDDLGINVTIFPEDY

SEQ ID NO: 313 - protein, 392 aa, Homo sapiens
MAVVAAAAGWLLRLRAAGAEGHWRRLPGAGLARGFLHPAATVEDAAQRRQVAHFTFQPDPEPREYGQTQKMNLFQSVTSALDNSLAKDPTAVIFGEDVAFGGVFRCTVGLRDKYGKDRVFNTPLCEQGIVGFGIGIAVTGATAIAEIQFADYIFPAFDQIVNEAAKYRYRSGDLFNCGSLTIRSPWGCVGHGALYHSQSPEAFFAHCPGIKVVIPRSPFQAKGLLLSCIEDKNPCIFFEPKILYRAAAEEVPIEPYNIPLSQAEVIQEGSDVTLVAWGTQVHVIREVASMAKEKLGVSCEVIDLRTIIPWDVDTICKSVIKTGRLLISHEAPLTGGFASEISSTVQEECFLNLEAPISRVCGYDTPFPHIFEPFYIPDKWKCYDALRKMINY

SEQ ID NO: 314 - protein, 97 aa, Homo sapiens
MDKQSSAGGVKRSVPCESNEVNETMPETPTGDSDPQPAPKKMKTSESSTILVVRYRRNVKRTSPEELLNDHARENRINPLQMEEEEFMEIMVEIPAK

SEQ ID NO: 315 - protein, 971 aa, Homo sapiens
MQTACQAVQHQRGRRQYNKLRNLLKDARHDCILFANEFQQCCYLPRERGESMEKWQTRSIYNAAVWYYHHCQDRMPIVMVTEDEEAIQQYGSETEGVFVITFKNYLDNFWPDLKAAHELCDSILQSRRERENESQESHGKEYPEHLPLEVLEAGIKSGRYIQGILNVNKHRAQIEAFVRLQGASSKDSDLVSDILIHGMKARNRSIHGDVVVVELLPKNEWKGRTVALCENDCDDKASGESPSEPMPTGRVVGILQKNWRDYVVTFPSKEEVQSQGKNAQKILVTPWDYRIPKIRISTQQAETLQDFRVVVRIDSWESTSVYPNGHFVRVLGRIGDLEGEIATILVENSISVIPFSEAQMCEMPVNTPESPWKVSPEEEQKRKDLRKSHLVFSIDPKGCEDVDDTLSVRTLNNGNLELGVHIADVTHFVAPNSYIDIEARTRATTYYLADRRYDMLPSVLSADLCSLLGGVDRYAVSIMWELDKASYEIKKVWYGRTIIRSAYKLFYEAAQELLDGNLSVVDDIPEFKDLDEKSRQAKLEELVWAIGKLTDIARHVRAKRDGCGALELEGVEVCVQLDDKKNIHDLIPKQPLEVHETVAECMILANHWVAKKIWESFPHQALLRQHPPPHQEFFSELRECAKAKGFFIDTRSNKTLADSLDNANDPHDPIVNRLLRSMATQAMSNALYFSTGSCAEEEFHHYGLALDKYTHFTSPIRRYSDIVVHRLLMAAISKDKKMEIKGNLFSNKDLEELCRHINNRNQAAQHSQKQSTELFQCMYFKDKDPATEERCISDGVIYSIRTNGVLLFIPRFGIKGAAYLKNKDGLVISCGPDSCSEWKPGSLQRFQNKITSTTTDGESVTFHLFDHVTVRISIQASRCHSDTIRLEIISNKPYKIPNTELIHQSSPLLKSELVKEVTKSVEEAQLAQEVKVNIIQEEYQEYRQTKGRSLYTLLEEIRDLALLDVSNNYGI

SEQ ID NO: 316 - protein, 837 aa, Homo sapiens
MEPAPSEVRLAVREAIHALSSSEDGGHIFCTLESLKRYLGEMEPPALPREKEEFASAHFSPVLRCLASRLSPAWLELLPHGRLEELWASFFLEGPADQAFLVLMETIEGAAGPSFRLMKMARLLARFLREGRLAVLMEAQCRQQTQPGFILLRETLLGKVVALPDHLGNRLQQENLAEFFPQNYFRLLGEEVVRVLQAVVDSLQGGLDSSVSFVSQVLGKACVHGRQQEILGVLVPRLAALTQGSYLHQRVCWRLVEQVPDRAMEAVLTGLVEAALGPEVLSRLLGNLVVKNKKAQFVMTQKLLFLQSRLTTPMLQSLLGHLAMDSQRRPLLLQVLKELLETWGSSSAIRHTPLPQQRHVSKAVLICLAQLGEPELRDSRDELLASMMAGVKCRLDSSLPPVRRLGMIVAEVVSARIHPEGPPLKFQYEEDELSLELLALASPQPAGDGASEAGTSLVPATAEPPAETPAEIVDGGVPQAQLAGSDSDLDSDDEFVPYDMSGDRELKSSKAPAYVRDCVEALTTSEDIERWEAALRALEGLVYRSPTATREVSVELAKVLLHLEEKTCVVGFAGLRQRALVAVTVTDPAPVADYLTSQFYALNYSLRQRMDILDVLTLAAQELSRPGCLGRTPQPGSPSPNTPCLPEAAVSQPGSAVASDWRVVVEERIRSKTQRLSKGGPRQGPAGSPSRFNSVAGHFFFPLLQRFDRPLVTFDLLGEDQLVLGRLAHTLGALMCLAVNTTVAVAMGKALLEFVWALRFHIDAYVRQGLLSAVSSVLLSLPAARLLEDLMDELLEARSWLADVAEKDPDEDCRTLALRALLLLQRLKNRLLPPASP

SEQ ID NO: 317 - protein, 303 aa, Homo sapiens
MATSRYEPVAEIGVGAYGTVYKARDPHSGHFVALKSVRVPNGGGGGGGLPISTVREVALLRRLEAFEHPNVVRLMDVCATSRTDREIKVTLVFEHVDQDLRTYLDKAPPPGLPAETIKDLMRQFLRGLDFLHANCIVHRDLKPENILVTSGGTVKLADFGLARIYSYQMALTPVVVTLWYRAPEVLLQSTYATPVDMWSVGCIFAEMFRRKPLFCGNSEADQLGKIFDLIGLPPEDDWPRDVSLPRGAFPPRGPRPVQSVVPEMEESGAQLLLEMLTFNPHKRISAFRALQHSYLHKDEGNPE

SEQ ID NO: 318 - protein, 284 aa, Homo sapiens
MDAIKKKMQMLKLDKENAIDRAEQAEADKKQAEDRCKQLEEEQQALQKKLKGTEDEVEKYSESVKEAQEKLEQAEKKATDAEADVASLNRRIQLVEEELDRAQERLATALQKLEEAEKAADESERGMKVIENRAMKDEEKMELQEMQLKEAKHIAEDSDRKYEEVARKLVILEGELERSEERAEVAESRARQLEEELRTMDQALKSLMASEEEYSTKEDKYEEEIKLLEEKLKEAETRAEFAERSVAKLEKTIDDLEETLASAKEENVEIHQTLDQTLLELNNL

SEQ ID NO: 319 - protein, 173 aa, Homo sapiens [sequence omitted]

SEQ ID NO: 320 - protein, 185 aa, Homo sapiens
MADGGGGGGTGAVGGGGTSQASAGAATGATGASGGGGPINPASLPPGDPQLIALIVEQLKSRGLFDSFRRDCLADVDTKPAYQNLRQKVDNFVSTHLDKQEWNPTMNKNQLRNGLRQSVVQSGMLEAGVDRIISQVVDPKLNHIFRPQIERAIHEFLAAQKKAAVPAPPPEPEGQDPPAPSQDTS

SEQ ID NO: 321 - protein, 568 aa, Homo sapiens
MGLLTFRDVAIEFSLEEWQCLDTAQRNLYKNVILENYRNLVFLGIAVSKQDLITCLEQEKEPLTVKRHEMVNEPPVMCSHFAQEFWPEQNIKDSFEKVTLRRYEKCGNDNFQLKGCKSVDECKLHKGGYNGLNQCLPTMQSKMFQCDKYVKVFNKFSHSDRHKIKHMENKPFKCKECGRSFCMLSHLTRHERNYTKVNFCKCEECEKAVNQSSKLTKHKRIYTCEKLYKCQECDRTFNQFSNLTEYKKDYAREKPYKCEECGKAFNQSSHLTTHKIIHTGEKPYKCEECGKAFNQFSNLTTHKKIHTGEQPYICEECGKAFTQSSTLTTHKRIHTGEKPYKCEECGKAFNRSSKLTEHKNIHTGEQPYKCEECGKAFNRSSNLTEHRKIHTEEKPYKCKECGKAFKHSSALTTHKRIHTGEKPYKCEECGKAFNRSSKLTEHKKLHTGKKPYKCEECGKAFIQSSKLTEHKKIHSGEIPYKCEECGKAFKHSSSLTTHKRIHTGEKPYKCEECGKAFSRSSKLTEHKIIHTGEKPYKCERCDKAFNQSANLTKHKKIHTGEKLQNWNV

SEQ ID NO: 322 - protein, 320 aa, Homo sapiens
MAQVLRGTVTDFPGFDERADAETLRKAMKGLGTDEESILTLLTSRSNAQRQEISAAFKTLFGRDLLDDLKSELTGKFEKLIVALMKPSRLYDAYELKHALKGAGTNEKVLTEIIASRTPEELRAIKQVYEEEYGSSLEDDVVGDTSGYYQRMLVVLLQANRDPDAGIDEAQVEQDAQALFQAGELKWGTDEEKFITIFGTRSVSHLRKVFDKYMTISGFQIEETIDRETSGNLEQLLLAVVKSIRSIPAYLAETLYYAMKGAGTDDHTLIRVMVSRSEIDLFNIRKEFRKNFATSLYSMIKGDTSGDYKKALLLLCGEDD

SEQ ID NO: 323 - protein, 882 aa, Homo sapiens
MPALACLRRLCRHVSPQAVLFLLFIFCLFSVFISAYYLYGWKRGLEPSADAPEPDCGDPPPVAPSRLLPLKPVQAATPSRTDPLVLVFVESLYSQLGQEVVAILESSRFKYRTEIAPGKGDMPTLTDKGRGRFALIIYENILKYVNLDAWNRELLDKYCVAYGVGIIGFFKANENSLLSAQLKGFPLFLHSNLGLKDCSINPKSPLLYVTRPSEVEKGVLPGEDWTVFQSNHSTYEPVLLAKTRSSESIPHLGADAGLHAALHATVVQDLGLHDGIQRVLFGNNLNFWLHKLVFVDAVAFLTGKRLSLPLDRYILVDIDDIFVGKEGTRMKVEDVKALFDTQNELRAHIPNFTFNLGYSGKFFHTGTNAEDAGDDLLLSYVKEFWWFPHMWSHMQPHLFHNQSVLAEQMALNKKFAVEHGIPTDMGYAVAPHHSGVYPVHVQLYEAWKQVWSIRVTSTEEYPHLKPARYRRGFIHNGIMVLPRQTCGLFTHTIFYNEYPGGSSELDKIINGGELFLTVLLNPISIFMTHLSNYGNDRLGLYTFKHLVRFLHSWTNLRLQTLPPVQLAQKYFQIFSEEKDPLWQDPCEDKRHKDIWSKEKTCDRFPKLLIIGPQKTGTTALYLFLGMHPDLSSNYPSSETFEEIQFFNGHNYHKGIDWYMEFFPIPSNTTSDFYFEKSANYFDSEVAPRRAAALLPKAKVLTILINPADRAYSWYQHQRAHDDPVALKYTFHEVITAGSDASSKLRALQNRCLVPGWYATHIERWLSAYHANQILVLDGKLLRTEPAKVMDMVQKFLGVTNTIDYHKTLAFDPKKGFWCQLLEGGKTKCLGKSKGRKYPEMDLDSRAFLKDYYRDHNIELSKLLYKMGQTLPTWLREDLQNTR

SEQ ID NO: 324 - protein, 2055 aa, Homo sapiens
QELTRLACSELRLLCPGPGFSELSYIKYTEMKRKVVNTHKLRLSPNEEAFILKEDYERRRKLRLLQVREQERDIALQIREDIKQRRNQQFTRLAEELRAEWEESQTQKIQNLEKLYLASLRSMGEGHRQAKENEPDLDALAQRAAERKRKADLRHKEALKVQKNQKEILLKQKTWHIKARKEALLVEKERSAKITSLPPPPPTLFENIEVKRISAVKTNSSTYHHLHTFVNRETDTKRPDARLAAEEEAKRLEELQKQAAQERMERFEKAHVRGFQAMKKIHLAQNQEKLMKELKQLQQEDLARRRQTVAQMPPQLVELPYKRSEMKEDWQRELEFAFEDMYNADRKVKGNLILHLEPEPLPTVTNQIQDEELDLSMEQENLGAAEDLPVTEAEICSSETDVPLVMKTQQIPSKVLFKKLLNKIRSQKSLWTIKSMSEDESEMITTVSEIESKAPTVESGTIASKERTLSSGQEQVVESDTLTIESGPLASEDKPLSCGTNSGKEQEINETLPITTVAQSSVLLHPQEAAARIRMSARQKQIMEIEEQKQKQLELLEQIEQQKLRLETDCFRAQLEEEKRKKTQPTGVGIAPASCPVISDEDSHRQMIRNYQHQLLQQNRLHRQSVETARKQLLEYQTMLKGRCPSVSAPSLITDSVISVPSWKSERPTAISEHWDQGQRLKLSPNKYQPIQPIQTSKLEQDHFQVARQNHFPQRQVETTETLRASDILTNQALESQEHLRQFSQTETQQRDYKLVPKDSETLSRALSHDRQLISQDARKISETFGATTFQSLESQQLFSENSENISYHLTEPSSFVPLVPQHSFSSLPVKVESGKIQEPFSAMSKSTVSTSHSIISQMHDRPLLPSENITAQQGNMKALQEQLDLQKKVLQATQEAQEQLLLCKQKEVEQQTGLSVFLPLVTPDSSALLPSAKADLGRIQESSPTKNNIAVSSDHHVISQLQDKRLSLSQPILSQQNNFKFLQEQLNIQKDSLQARREAQEVLYVHKQSELDRRVCSEQAEPSFPFQVAQHTFTSLPSADTKSGKIQEQHSSKSEKGLVSCQSDIPISQDGSLSFLQQFLPLHDSLKLLQEQLTKQRDTLQARHEAQVELLLHRQRDLGDSKSGLVSSSSSPVVVQHSVASQASAKAEPRRIQELYLSEKENVGPSCHLIIPTFQDKSLSFPQHSLAQQENLTILQEQSQIQRVILGAKEGTQEFVHTESELEKRISSEQTGTSSSLSQVDESERFQECISIKSDSTIPLSHPKIPRCQERLLRVSQHMLPLQDNLEEHQAWLDTEKEAFHFSQKTQENTSSEQTGSSSFIPQLVQLSFTSLASAESGTILEPLFTESESKIFSSHLQIPQLQDRLLRISQLIQPQQDNLKALQEQLATQREAIILARQEAREELLLHQSEWEGRISPEQVDTSSLPLVPQHSFASLPLNESERNQEPCSINSDNIVSSGHSEIPTLPDGLLGLSHLVLPQQDNLIALEEHLHAQTDFLPSIEKTQKELVLSKPCKFEEKVSSEHFIQSHHGDLQALQQQLDTQKKAIRSIQEVQEELLLQRLSELEKRVSSEQVCSSSFVSQVPVADSERTQKSFPTKSNDTLPSSHREIPRLQDRLLSLSKPILPQQDNMTAQLDAQREVMYSYEKPQEELSLNKQRKLNKSESAEHTIPSLFLPKETEHSFIPLPFAEAKPKSTCELYSSQNEHAAPPSNPVIPGFQDRLLSFSQSVLTQQDNLGLQKQLDLQREVLHYSQKAQEKLLVQRQTALQQQIQKHEETLKDFFKDSQISKPTVENDLKTQKMGQLRDWFPNTQDLAGNDQENIRHADRNNSDDNHLASEDTSAKQSGEHLEKDLGRRSSKPPVAKVKCGLDLNQHELSAIQEVESPAIGRTSILGKPGIYEDRDPLRVSISREQSFFGSPLAHDPFSCLQLVGQENVCGDDYDEAVKLKESVVENHAVLSYAVEEEHAYLGPTVKPDDKAKTLSYEPLSSATVSTGSLLSYENTDLSLTDPESFSEHMDDSKQESTTSKEEETNIISSIVPSTQDSAAELFRRS

SEQ ID NO: 325 - protein, 619 aa, Homo sapiens
MADEGKSYSEHDDERVNFPQRKKKGRGPFRWKYGEGNRRSGRGGSGIRSSRLEEDDGDVAMSDAQDGPRVRYNPYTTRPNRRGDTWHDRDRIHVTVRRDRAPPERGGAGTSQDGTSKNWFKITIPYGRKYDKAWLLSMIQSKCSVPFTPIEFHYENTRAQFFVEDASTASALKAVNYKILDRENRRISIIINSSAPPHTILNELKPEQVEQLKLIMSKRYDGSQQALDLKGLRSDPDLVAQNIDVVLNRRSCMAATLRIIEENIPELLSLNLSNNRLYRLDDMSSIVQKAPNLKILNLSGNELKSERELDKIKGLKLEELWLDGNSLCDTFRDQSTYISAIRERFPKLLRLDGHELPPPIAFDVEAPTTLPPCKGSYFGTENLKSLVLHFLQQYYAIYDSGDRQGLLDAYHDGACCSLSIPFIPQNPARSSLAEYFKDSRNVKKLKDPTLRFRLLKHTRLNVVAFLNELPKTQHDVNSFVVDISAQTSTLLCFSVNGVFKEVDGKSRDSLRAFTRTFIAVPASNSGLCIVNDELFVRNASSEEIQRAFAMPAPTPSSSPVPTLSPEQQEMLQAFSTQSGMNLEWSQKCLQDNNWDYTRSAQAFTHLKAKGEIPEVAFMK

SEQ ID NO: 326 - protein, 255 aa, Homo sapiens
MWQGCAVERPVGRMTSQTPLPQSPRPRRPTMSTVVELNVGGEFHTTTLGTLRKFPGSKLAEMFSSLAKASTDAEGRFFIDRPSTYFRPILDYLRTGQVPTQHIPEVYREAQFYEIKPLVKLLEDMPQIFGEQVSRKQFLLQVPGYSENLELMVRLARAEAITARKSSVLVCLVETEEQDAYYSEVLCFLQDKKMFKSVVKFGPWKAVLDNSDLMHCLEMDIKAQGYKVFSKFYLTYPTKRNEFHFNIYSFTFTWW

SEQ ID NO: 327 - protein, 344 aa, Homo sapiens
MSGEPELIELRELAPAGRAGKGRTRLERANALRIARGTACNPTRQLVPGRGHRFQPAGPATHTWCDLCGDFIWGVVRKGLQCARLSADCKFTCHYRCRALVCLDCCGPRDLGWEPAVERDTNVDEPVEWETPDLSQAEIEQKIKEYNAQINSNLFMSLNKDGSYTGFIKVQLKLVRPVSVPSSKKPPSLQDARRGPGRGTSVRRRTSFYLPKDAVKHLHVLSRTRAREVIEALLRKFLVVDDPRKFALFERAERHGQVYLRKLLDDEQPLRLRLLAGPSDKALSFVLKENDSGEVNWDAFSMPELHNFLRILQREEEEHLRQILQKYSYCRQKIQEALHACPLG

SEQ ID NO: 328 - protein, 567 aa, Homo sapiens
MKPVWVATLLWMLLLVPRLGAARKGSPEEASFYYGTFPLGFSWGVGSSAYQTEGAWDQDGKGPSIWDVFTHSGKGKVLGNETADVACDGYYKVQEDIILLRELHVNHYRFSLSWPRLLPTGIRAEQVNKKGIEFYSDLIDALLSSNITPIVTLHHWDLPQLLQVKYGGWQNVSMANYFRDYANLCFEAFGDRVKHWITFSDPRAMAEKGYETGHHAPGLKLRGTGLYKAAHHIIKAHAKAWHSYNTTWRSKQQGLVGISLNCDWGEPVDISNPKDLEAAERYLQFCLGWFANPIYAGDYPQVMKDYIGRKSAEQGLEMSRLPVFSLQEKSYIKGTSDFLGLGHFTTRYITERNYPSRQGPSYQNDRDLIELVDPNWPDLGSKWLYSVPWGFRRLLNFAQTQYGDPPIYVMENGASQKFHCTQLCDEWRIQYLKGYINEMLKAIKDGANIKGYTSWSLLDKFEWEKGYSDRYGFYYVEFNDRNKPRYPKASVQYYKKIIIANGFPNPREVESWYLKALETCSINNQMLAAEPLLSHMQMVTEIVVPTVCSLCVLITAVLLMLLLRRQS

SEQ ID NO: 329 - protein, 393 aa, Homo sapiens
MSCSESPAANSFLVDSLISSGRGEAGGGGGGAGGGGGGGYYAHGGVYLPPAADLPYGLQSCGLFPTLGGKRNEAASPGSGGGGGGLGPGAHGYGPSPIDLWLDAPRSCRMEPPDGPPPPPQQQPPPPPQPPQPAPQATSCSFAQNIKEESSYCLYDSADKCPKVSATAAELAPFPRGPPPDGCALGTSSGVPVPGYFRLSQAYGTAKGYGSGGGGAQQLGAGPFPAQPPGRGFDLPPALASGSADAARKERALDSPPPPTLACGSGGGSQGDEEAHASSSAAEELSPAPSESSKASPEKDSLGNSKGENAANWLTAKSGRKKRCPYTKHQTLELEKEFLFNMYLTRERRLEISRSVHLTDRQVKIWFQNRRMKLKKMNRENRIRELTANFNFS

SEQ ID NO: 330 - protein, 104 aa, Homo sapiens
MQKPPAPHRGPLSLHLALTRTVIELALGAWGEWRGLGGIHWPQPQSFSSVTQEAKAQLEISPGHCICAKTYSCPCRACISCSPGYHNGVPFGGDVRPAACLGRS

SEQ ID NO: 331 - protein, 1410 aa, Homo sapiens
MADTDLFMECEEEELEPWQKISDVIEDSVVEDYNSVDKTTTVSVSQQPVSAPVPIAAHASVAGHLSTSTTVSSSGAQNSDSTKKTLVTLIANNNAGNPLVQQGGQPLILTQNPAPGLGTMVTQPVLRPVQVMQNANHVTSSPVASQPIFITTQGFPVRNVRPVQNAMNQVGIVLNVQQGQTVRPITLVPAPGTQFVKPTVGVPQVFSQMTPVRPGSTMPVRPTTNTFTTVIPATLTIRSTVPQSQSQQTKSTPSTSTTPTATQPTSLGQLAVQSPGQSNQTTNPKLAPSFPSPPAVSIASFVTVKRPGVTGENSNEVAKLVNTLNTIPSLGQSPGPVVVSNNSSAHGSQRTSGPESSMKVTSSIPVFDLQDGGRKICPRCNAQFRVTEALRGHMCYCCPEMVEYQKKGKSLDSEPSVPSAAKPPSPEKTAPVASTPSSTPIPALSPPTKVPEPNENVGDAVQTKLIMLVDDFYYGRDGGKVAQLTNFPKVATSFRCPHCTKRLKNNIRFMNHMKHHVELDQQNGEVDGHTICQHCYRQFSTPFQLQCHLENVHSPYESTTKCKICEWAFESEPLFLQHMKDTHKPGEMPYVCQVCQYRSSLYSEVDVHFRMIHEDTRHLLCPYCLKVFKNGNAFQQHYMRHQKRNVYHCNKCRLQFLFAKDKIEHKLQHHKTFRKPKQLEGLKPGTKVTIRASRGQPRTVPVSSNDTPPSALQEAAPLTSSMDPLPVFLYPPVQRSIQKRAVRKMSVMGRQTCLECSFEIPDFPNHFPTYVHCSLCRYSTCCSRAYANHMINNHVPRKSPKYLALFKNSVSGIKLACTSCTFVTSVGDAMAKHLVFNPSHRSSSILPRGLTWIAHSRHGQTRDRVHDRNVKNMYPPPSFPTNKAATVKSAGATPAEPEELLTPLAPALPSPASTATPPPTPTHPQALALPPLATEGAECLNVDDQDEGSPVTQEPELASGGGGSGGVGKKEQLSVKKLRVVLFALCCNTEQAAEHFRNPQRRIRRWLRRFQASQGENLEGKYLSFEAEEKLAEWVLTQREQQLPVNEETLFQKATKIGRSLEGGFKISYEWAVRFMLRHHLTPHARRAVAHTLPKDVAENAGLFIDFVQRQIHNQDLPLSMIVAIDEISLFLDTEVLSSDDRKENALQTVGTGEPWCDVVLAILADGTVLPTLVFYRGQMDQPANMPDSILLEAKESGYSDDEIMELWSTRVWQKHTACQRSKGMLVMDCHRTHLSEEVLAMLSASSTLPAVVPAGCSSKIQPLDVCIKRTVKNFLHKKWKEQAREMADTACDSDVLLQLVLVWLGEVLGVIGDCPELVQRSFLVASVLPGPDGNINSPTRNADMQEELIASLEEQLKLSGEHSESSTPRPRSSPEETIEPESLHQLFEGESETESFYGFEEADLDLMEI

SEQ ID NO: 332 - protein, 481 aa, Homo sapiens
MAAAPGGSAQPAGPGPRLGFSTADSGVGMSGLNPGPAVPMKDHDAIKLFVGQIPRGLDEQDLKPLFEEFGRIYELTVLKDRLTGLHKGCAFLTYCARDSALKAQSALHEQKTLPGMNRPIQVKPAASEGRGEDRKLFVGMLGKQQGEEDVRRLFQPFGHIEECTVLRSPDGTSKGCAFVKFGSQGEAQAAIRGLHGSRTMAGASSSLVVKLADTDRERALRRMQQMAGHLGAFHPAPLPLGACGAYTTAILQHQAALLAAAQGPGLGPVAAVAAQMQHVAAFSLVAAPLLPAAAANSPPGSGPGTLPGLPAPIGVNGFGPLTPQTNGQPGSDTLYNNGLSPYPAQSPGVADPLQQAYAGMHHYAAAYPSAYAPVSTAFPQQPSALPQQQREGPEGCNLFIYHLPQEFGDAELIQTFLPFGAVVSAKVFVDRATNQSKCFGFVSFDNPTSAQTAIQAMNGFQIGMKRLKVQLKRPKDANRPY

SEQ ID NO: 333 - protein, 1124 aa, Homo sapiens
MADGPRCKRRKQANPRRNNVTNYNTVVETNSDSDDEDKLHIVEEESVTDAADCEGVPEDDLPTDQTVLPGRSSEREGNAKNCWEDDRKEGQEILGPEAQADEAGCTVKDDECESDAENEQNHDPNVEEFLQQQDTAVIFPEAPEEDQRQGTPEASGHDENGTPDAFSQLLTCPYCDRGYKRFTSLKEHIKYRHEKNEDNFSCSLCSYTFAYRTQLERHMTSHKSGRDQRHVTQSGCNRKFKCTECGKAFKYKHHLKEHLRIHSGEKPYECPNCKKRFSHSGSYSSHISSKKCISLIPVNGRPRTGLKTSQCSSPSLSASPGSPTRPQIRQKIENKPLQEQLSVNQIKTEPVDYEFKPIVVASGINCSTPLQNGVFTGGGPLQATSSPQGMVQAVVLPTVGLVSPISINLSDIQNVLKVAVDGNVIRQVLENNQANLASKEQETINASPIQQGGHSVISAISLPLVDQDGTTKIIINYSLEQPSQLQVVPQNLKKENPVATNSCKSEKLPEDLTVKSEKDKSFEGGVNDSTCLLCDDCPGDINALPELKHYDLKQPTQPPPLPAAEAEKPESSVSSATGDGNLSPSQPPLKNLLSLLKAYYALNAQPSAEELSKIADSVNLPLDVVKKWFEKMQAGQISVQSSEPSSPEPGKVNIPAKNNDQPQSANANEPQDSTVNLQSPLKMTNSPVLPVGSTTNGSRSSTPSPSPLNLSSSRNTQGYLYTAEGAQEEPQVEPLDLSLPKQQGELLERSTITSVYQNSVYSVQEEPLNLSCAKKEPQKDSCVTDSEPVVNVIPPSANPINIAIPTVTAQLPTIVAIADQNSVPCLRALAANKQTILIPQVAYTYSTTVSPAVQEPPLKVIQPNGNQDERQDTSSEGVSNVEDQNDSDSTPPKKKMRKTENGMYACDLCDKIFQKSSSLLRHKYEHTGKRPHECGICKKAFKHKHHLIEHMRLHSGEKPYQCDKCGKRFSHSGSYSQHMNHRYSYCKREAEERDSTEQEEAGPEILSNEHVGARASPSQGDSDERESLTREEDEDSEKEEEEEDKEMEELQEEKECEKPQGDEEEEEEEEEVEEEEVEEAENEGEEAKTEGLMKDDRAESQASSLGQKVGESSEQVSEEKTNEA

SEQ ID NO: 334 - protein, 1416 aa, Homo sapiens
MKSLKSRLRRQDVPGPASSGAAAASAHAADWNKYDDRLMKAAERGDVEKVTSILAKKGVNPGKLDVEGRSVFHVVTSKGNLECLNAILIHGVDITTSDTAGRNALHLAAKYGHALCLQKLLQYNCPTEHADLQGRTALHDAAMADCPSSIQLLCDHGASVNAKDVDGRTPLVLATQMSRPTICQLLIDRGADVNSRDKQNRTALMLGCEYGCRDAVEVLIKNGADISLLDALGHDSSYYARIGDNLDILTLLKTASENTNKGRELWKKGPSLQQRNLTHMQDEVNVKSHQREHQNIQDLEIENEDLKERLRKIQQEQRILLDKVNGLQLQLNEEVMVADDLESEREKLKSLLAAKEKQHEESLRTIEALKNRFKYFESDHLGSGSHFSNRKEDMLLKQGQMYMADSQCTSPGIPAHMQSRSMLRPLELSLPSQTSYSENEILKKELEAMRTFCESAKQDRLKLQNELAHKVAECKALALECERVKEDSDEQIKQLEDALKDVQKRMYESEGKVKQMQTHFLALKEHLTSEAASGNHRLTEELKDQLKDLKVKYEGASAEVGKLRNQIKQNEMIVEEFKRDEGKLIEENKRLQKELSMCEMEREKKGRKVTEMEGQAKELSAKLALSIPAEKFENMKSSLSNEVNEKAKKLVEMEREHEKSLSEIRQLKRELENVKAKLAQHVKPEEHEQVKSRLEQKSGELGKKITELTLKNQTLQKEIEKVYLDNKLLKEQAHNLTIEMKNHYVPLKVSEDMKKSHDAIIDDLNRKLLDVTQKYTEKKLEMEKLLLENDSLSKDVSRLETVFVPPEKHEKEIIALKSNIVELKKQLSELKKKCGEDQEKIHALTSENTNLKKMMSNQYVPVKTHEEVKMTLNDTLAKTNRELLDVKKKFEDINQEFVKIKDKNEILKRNLENTQNQIKAEYISLAEHEAKMSSLSQSMRKVQDSNAEILANYRKGQEEIVTLHAEIKAQKKELDTIQECIKVKYAPIVSFEECERKFKATEKELKDQLSEQTQKYSVSEEEVKKNKQENDKLKKEIFTLQKDLRDKTVLIEKSHEMERALSRKTDELNKQLKDLSQKYTEVKNVKEKLVEENAKQTSEILAVQNLLQKQHVPLEQVEALKKSLNGTIENLKEELKSMQRCYEKEQQTVTKLHQLLENQKNSSVPLAEHLQIKEAFEKEVGIIKASLREKEEESQNKMEEVSKLQSEVQNTKQALKKLETREVVDLSKYKATKSDLETQISSLNEKLANLNRKYEEVCEEVLHAKKKEISAKDEKELLHFSIEQEIKDQKERCDKSLTTITELQRRIQESAKQIEAKDNKITELLNDVERLKQALNGLSQLTYTSGNPTKRQSQLIDTLQHQVKSLEQQLADADRQHQEVIAIYRTHLLSAAQGHMDEDVQEALLQIIQMRQGLVC

SEQ ID NO: 335 - protein, 260 aa, Homo sapiens
MEPVPLQDFVRALDPASLPRVLRVCSGVYFEGSIYEISGNECCLSTGDLIKVTQVRLQKVVCENPKTSQTMELAPNFQGYFTPLNTPQSYETLEELVSATTQSSKQLPTCFMSTHRIVTEGRVVTEDQLLMLEAVVMHLGIRSARCVLGMEGQQVILHLPLSQKGPFWTWEPSAPRTLLQVLQDPALKDLVLTCPTLPWHSLILRPQYEIQAIMHIFSSLRIAATRSAAQTQGEDLARVHQGWLQYVQQDSCPQEGPQAR

SEQ ID NO: 336 - protein, 530 aa, Homo sapiens
MARTGWTSPIPLCVSLLLTCGFAEAGKLLVVPMDGSHWFTMQSVVEKLILRGHEVVVVMPEVSWQLGKSLNCTVKTYSTSYTLEDLDREFMDFADAQWKAQVRSLFSLFLSSSNGFFNLFFSHCRSLFNDRKLVEYLKESSFDAVFLDPFDACGLIVAKYFSLPSVVFARGIACHYLEEGAQCPAPLSYVPRILLGFSDAMTFKERVRNHIMHLEEHLFCQYFSKNALEIASEILQTPVTAYDLYSHTSIWLLRTDFVLDYPKPVMPNMIFIGGINCHQGKPLPMEFEAYINASGEHGIVVFSLGSMVSEIPEKKAMAIADALGKIPQTVLWRYTGTRPSNLANNTILVKWLPQNDLLGHPMTRAFITHAGSHGVYESICNGVPMVMMPLFGDQMDNAKRMETKGAGVTLNVLEMTSEDLENALKAVINDKSYKENIMRLSSLHKDRPVEPLDLAVFWVEFVMRHKGAPHLRPAAHDLTWYQYHSLDVIGFLLAVVLTVAFITFKCCAYGYRKCLGKKGRVKKAHKSKTH

SEQ ID NO: 337 - protein, 153 aa, Homo sapiens
MMILVFWSNYPYEPVCLASHRNNMEASVPKYKKHLPQLGMQKEMEQDVKRFGQAAWATAIPRLEKLKLMLAQETLQLMRAKELCLNHKRAEIQGKMEDLPEQEKNINVVDELAIQFYEIQLELYEVKFEILKNKEILLTTQLDSLERLIKDEI

SEQ ID NO: 338 - protein, 629 aa, Homo sapiens
  misc_feature (174)..(174): Xaa can be any naturally occurring amino acid
  misc_feature (247)..(247): Xaa can be any naturally occurring amino acid
  misc_feature (498)..(498): Xaa can be any naturally occurring amino acid
  misc_feature (511)..(511): Xaa can be any naturally occurring amino acid
  misc_feature (558)..(558): Xaa can be any naturally occurring amino acid
  misc_feature (569)..(569): Xaa can be any naturally occurring amino acid
  misc_feature (592)..(592): Xaa can be any naturally occurring amino acid
  misc_feature (598)..(598): Xaa can be any naturally occurring amino acid
  misc_feature (601)..(601): Xaa can be any naturally occurring amino acid
  misc_feature (612)..(612): Xaa can be any naturally occurring amino acid
MHGAAYSVQHSVGWPGGMEQPACPRKAGVTGHNWTQAVRRGQARARQALGPLPPTAMEDEQPDSLEGWAPLREGLFADPQRHRLRFLVAWNGAEGKFAVTCHDRTAQQPQRREGARLGLEHKPEAAVSPPSWAGRLSAAGFRGARRQPAALWPPLEHCFPRLPPELDVGGGGAXGLGLGRWALLWPARVGPGEAALQELCGQLERYLGAAAHGCGGATVRDALFAAKGRAADCESPREFRERALRAXWVEADARLRQVIQGHGKANTMVALMKVYQEEDEAYQELVTVATTFFQYLLRPFRAMREVATLCKLDILKSLDEDDLGPRRVVALEKEAEEWTRRAGEAVVSIQDITVNYFKETVKALAGMQKEMEQDVKRLGQAAWATAIPRLEKLKLMLAQETLQLMRAKELYLNCKRAEIQGKMEDLPEQEKNINVVDELEIQFYEIQLELYEVKFEILKNKEILLTTQLDSLERLIKEKQDEVVYYDPCESPEELSHXLWWGCRTIRIRKXKNSEGSASSWSLLNGAGSVSKELLSRVERISAKKIIGSDCNRLKKAXDILVSITVFRXDKIKRSKRKKNGSTKNVKHSNDXEHLKMXVLXTITSSTLLGKXMKTALKRKVLRTGHSEH

SEQ ID NO: 339 - protein, 544 aa, Homo sapiens
MEKLQEHLIKAKAFTIKKTLEIYVPIKQFFYNLIHPEYSAVTDVYVLMFLADTVDFIIIVFGFWAFGKHSAAADITSSLSEDQVPGPFLVMVLIQFGTMVVDRALYLRKTVLGKVIFQVILVFGIHFWMFFILPGVTERKFSQNLVAQLWYFVKCVYFGLSAYQIRCGYPTRVLGNFLTKSYNYVNLFLFQGFRLVPFLTELRAVMDWVWTDTTLSLSSWICVEDIYAHIFILKCWRESEKPIFTMSAQQSQLKVMDQQSFNKFIQAFSRDTGAMQFLENYEKEDITVAELEGNSNSLWTISPPSKQKMIHELLDPNSSFSVVFSWSIQRNLSLGAKSEIATDKLSFPLKNITRKNIAKMIAGNSTESSKTPVTIEKIYPYYVKAPSDSNSKPIKQLLSENNFMDITIILSRDNTTKYNSEWWVLNLTGNRIYNPNSQALELVVFNDKVSPPSLGFLAGYGIMGLYASVVLVIGKFVREFFSGISHSIMFEELPNVDRILKLCTDIFLVRETGELELEEDLYAKLIFLYRSPETMIKWTREKTN

SEQ ID NO: 340 - protein, 898 aa, Homo sapiens
MSETDHIASTSSDKNVGKTPELKEDSCNLFSGNESSKLENESKLLSLNTDKTLCQPNEHNNRIEAQENYIPDHGGGEDSCAKTDTGSENSEQIANFPSGNFAKHISKTNETEQKVTQILVELRSSTFPESANEKTYSESPYDTDCTKKFISKIKSVSASEDLLEEIESELLSTEFAEHRVPNGMNKGEHALVLFEKCVQDKYLQQEHIIKKLIKENKKHQELFVDICSEKDNLREELKKRTETEKQHMNTIKQLESRIEELNKEVKASRDQLIAQDVTAKNAVQQLHKEMAQRMEQANKKCEEARQEKEAMVMKYVRGEKESLDLRKEKETLEKKLRDANKELEKNTNKIKQLSQEKGRLHQLYETKEGETTRLIREIDKLKEDINSHVIKVKWAQNKLKAEMDSHKETKDKLKETTTKLTQAKEEADQIRKNCQDMIKTYQESEEIKSNELDAKLRVTKGELEKQMQEKSDQLEMHHAKIKELEDLKRTFKEGMDELRTLRTKVKCLEDERLRTEDELSKYKEIINRQKAEIQNLLDKVKTADQLQEQLQRGKQEIENLKEEVESLNSLINDLQKDIEGSRKRESELLLFTERLTSKNAQLQSESNSLQSQFDKVSCSESQLQSQCEQMKQTNINLESRLLKEEELRKEEVQTLQAELACRQTEVKALSTQVEELKDELVTQRRKHASSIKDLTKQLQQARRKLDQVESGSYDKEVSSMGSRSSSSGSLNARSSAEDRSPENTGSSVAVDNFPQVDKAMLIERIVRLQKAHARKNEKIEFMEDHIKQLVEEIRKKTKIIQSYILREESGTLSSEASDFNKVHLSRRGGIMASLYTSHPADNGLTLELSLEINRKLQAVLEDTLLKNITLKENLQTLGTEIERLIKHQHELEQRTKKT

SEQ ID NO: 341 - protein, 297 aa, Homo sapiens
MEDYTKIEKIGEGTYGVVYKGRHKTTGQVVAMKKIRLESEEEGVPSTAIREISLLKELRHPNIVSLQDVLMQDSRLYLIFEFLSMDLKKYLDSIPPGQYMDSSLVKSYLYQILQGIVFCHSRRVLHRDLKPQNLLIDDKGTIKLADFGLARAFGIPIRVYTHEAITLWYRSPEVLLGSARYSTPVDIWSIGTIFAELATKKPLFHGDSEIDQLFRIFRALGTPNNEVWPEVESLQDYKNTFPKWKPGSLASHVKNLDENGLDLLSKMLIYDPAKRISGKMALNHPYFNDLDNQIKKM

SEQ ID NO: 342 - protein, 1212 aa, Homo sapiens
MEPRPTAPSSGAPGLAGVGETPSAAALAAARVELPGTAVPSVPEDAAPASRDGGGVRDEGPAAAGDGLGRPLGPTPSQSRFQVDLVSENAGRAAAAAAAAAAAAAAAGAGAGAKQTPADGEASGESEPAKGSEEAKGRFRVNFVDPAASSSAEDSLSDAAGVGVDGPNVSFQNGGDTVLSEGSSLHSGGGGGSGHHQHYYYDTHTNTYYLRTFGHNTMDAVPRIDHYRHTAAQLGEKLLRPSLAELHDELEKEPFEDGFANGEESTPTRDAVVTYTAESKGVVKFGWIKGVLVRCMLNIWGVMLFIRLSWIVGQAGIGLSVLVIMMATVVTTITGLSTSAIATNGFVRGGGAYYLISRSLGPEFGGAIGLIFAFANAVAVAMYVVGFAETVVELLKEHSILMIDEINDIRIIGAITVVILLGISVAGMEWEAKAQIVLLVILLLAIGDFVIGTFIPLESKKPKGFFGYKSEIFNENFGPDFREEETFFSVFAIFFPAATGILAGANISGDLADPQSAIPKGTLLAILITTLVYVGIAVSVGSCVVRDATGNVNDTIVTELTNCTSAACKLNFDFSSCESSPCSYGLMNNFQVMSMVSGFTPLISAGIFSATLSSALASLVSAPKIFQALCKDNIYPAFQMFAKGYGKNNEPLRGYILTFLIALGFILIAELNVIAPIISNFFLASYALINFSVFHASLAKSPGWRPAFKYYNMWISLLGAILCCIVMFVINWWAALLTYVIVLGLYIYVTYKKPDVNWGSSTQALTYLNALQHSIRLSGVEDHVKNFRPQCLVMTGAPNSRPALLHLVHDFTKNVGLMICGHVHMGPRRQAMKEMSIDQAKYQRWLIKNKMKAFYAPVHADDLREGAQYLMQAAGLGRMKPNTLVLGFKKDWLQADMRDVDMYINLFHDAFDIQYGVVVIRLKEGLDISHLQGQEELLSSQEKSPGTKDVVVSVEYSKKSDLDTSKPLSEKPITHKVEEEDGKTATQPLLKKESKGPIVPLNVADQKLLEASTQFQKKQGKNTIDVWWLFDDGGLTLLIPYLLTTKKKWKDCKIRVFIGGKINRIDHDRRAMATLLSKFRIDFSDIMVLGDINTKPKKENIIAFEEIIEPYRLHEDDKEQDIADKMKEDEPWRITDNELELYKTKTYRQIRLNELLKEHSSTANIIVMSLPVARKGAVSSALYMAWLEALSKDLPPILLVRGNHQSVLTFYS

SEQ ID NO: 343 - protein, 1211 aa, Homo sapiens
MLSLAAKLVAFFWRTADTPREEAGQLEPELAEGDTKLKTVRGVVTRYCSDYGMIDDMIYFSSDAVTSRVLLNVGQEVIAVVEENKVSNGLKAIRVEAVSDKWEDDSRNHGSPSDCGPRVLIGCVTSLVEGAGCISQTTYFSLESVCEGFEPCKGDWVEAEYRIRPGTWSSEATSVKPLRYKRVDKVCISSLCGRNGVLEESIFFTLDSLKLPDGYTPRRGDVVNAVVVESSQSCYVWRALCMTLVKRRDAAPVHEATHFYGTILLKNKGDIEVTQVTHFGTLKEGRSKTMVIWIENKGDIPQNLVSCKLAGWDKSKQFRFQMLDKDQMCPVVSFVSVPEKENSSDENINSLNSHTKNKTSQMSESSLVNNRGISPGDCTCKGENGEKDNILSRKQMTEPEPGGLVPPGGKTFIVVICDGKNPGRCKELLLLCFSDFLIGRYLEVNVISGEESLIAAREPFSWKKLKSSQALTSAKTTVVVTAQKRNSRRQLPSFLPQYPIPDRLRKCVEQKIDILTFQPLLAELLNMSNYKEKFSTLLWLEEIYAEMELKEYNMSGIILRRNGDLLVLEVPGLAEGRPSLYAGDKLILKTQEYNGHAIEYISYVTEIHEEDVTLKINPEFEQAYNFEPMDVEFTYNRTTSRRCHFALEHVIHLGVKVLFPEEIILQSPQVTGNWNHAQDTKSSGQSTSKKNRKTMTDQAEHGTEERRVGDKDLPVLAPFTAEMSDWVDEIQTPKARKMEFFNPVLNENQKLAVKRILSGDCRPLPYILFGPPGTGKTVTIIEAVLQVHFALPDSRILVCAPSNSAADLVCLRLHESKVLQPATMVRVNATCRFEEIVIDAVKPYCRDGEDIWKASRFRIIITTCSSSGLFYQIGVRVGHFTHVFVDEAGQASEPECLIPLGLMSDISGQIVLAGDPMQLGPVIKSRLAMAYGLNVSFLERLMSRPAYQRDENAFGACGAHNPLLVTKLVKNYRSHEALLMLPSRLFYHRELEVCADPTVVTSLLGWEKLPKKGFPLIFHGVRGSEAREGKSPSWFNPAEAVQVLRYCCLLAHSISSQVSASDIGVITPYRKQVEKIRILLRNVDLMDIKVGSVEEFQGQEYLVIIISTVRSNEDRFEDDRYFLGFLSNSKRFNVAITRPKALLIVLGNPHVLVRDPCFGALLEYSITNGVYMGCDLPPALQSLQNCGEGVADPSYPVVPESTGPEKHQEPS

SEQ ID NO: 344 - protein, 1194 aa, Homo sapiens
MAKPYEFNWQKEVPSFLQEGAVFDRYEEESFVFEPNCLFKVDEFGFFLTWRSEGKEGQVLECSLINSIRSGAIPKDPKILAALEAVGKSENDLEGRIVCVCSGTDLVNISFTYMVAENPEVTKQWVEGLRSIIHNFRANNVSPMTCLKKHWMKLAFMTNTNGKIPVRSITRTFASGKTEKVIFQALKELGLPSGKNDEIEPTAFSYEKFYELTQKICPRTDIEDLFKKINGDKTDYLTVDQLVSFLNEHQRDPRLNEILFPFYDAKRAMQIIEMYEPDEDLKKKGLISSDGFCRYLMSDENAPVFLDRLELYQEMDHPLAHYFISSSHNTYLTGRQFGGKSSVEMYRQVLLAGCRCVELDCWDGKGEDQEPIITHGKAMCTDILFKDVIQAIKETAFVTSEYPVILSFENHCSKYQQYKMSKYCEDLFGDLLLKQALESHPLEPGRALPSPNDLKRKILIKNKRLKPEVEKKQLEALRSMMEAGESASPANILEDDNEEEIESADQEEEAHPEFKFGNELSADDLGHKEAVANSVKKGLVTVEDEQAWMASYKYVGATTNIHPYLSTMINYAQPVKFQGFHVAEERNIHYNMSSFNESVGLGYLKTHAIEFVNYNKRQMSRIYPKGGRVDSSNYMPQIFWNAGCQMVSLNYQTPDLAMQLNQGKFEYNGSCGYLLKPDFMRRPDRTFDPFSETPVDGVIAATCSVQVISGQFLSDKKIGTYVEVDMYGLPTDTIRKEFRTRMVMNNGLNPVYNEESFVFRKVILPDLAVLRIAVYDDNNKLIGQRILPLDGLQAGYRHISLRNEGNKPLSLPTIFCNIVLKTYVPDGFGDIVDALSDPKKFLSITEKRADQMRAMGIETSDIADVPSDTSKNDKKGKANTAKANVTPQSSSELRPTTTAALASGVEAKKGIELIPQVRIEDLKQMKAYLKHLKKQQKELNSLKKKHAKEHSTMQKLHCTQVDKIVAQYDKEKSTHEKILEKAMKKKGGSNCLEMKKETEIKIQTLTSDHKSKVKEIVAQHTKEWSEMINTHSAEEQEIRDLHLSQQCELLKKLLINAHEQQTQQLKLSHDRESKEMRAHQAKISMENSKAISQDKSIKNKAERERRVRELNSSNTKKFLEERKRLAMKQSKEMDQLKKVQLEHLEFLEKQNEQLLKSCHAVSQTQGEGDAADGEIGSRDGPQTSNSSMKLQNAN

SEQ ID NO: 345 - protein, 131 aa, Homo sapiens
MEMGKWIHLELRNRTPSDVKELFLDNSQSNEGKLEGLTDEFEELELLNTINIGLTSIANLPKLNKLKKLELSSNRASVGLEVLAEKCPNLIHLNLSGNKIKDLSTIEPLKKLENLESLDLFTCEVTNLNNY

SEQ ID NO: 346 - protein, 441 aa, Homo sapiens
MEISSHQSHLLQQLNEQRRQDVFCDCSILVEGKVFKAHRNVLFASSGYFKMLLSQNSKETSQPTTATFQAFSPDTFTVILDFVYSGKLSLTGQNVIEVMSAASFLQMTDVISVCKTFIKSSLDISEKEKDRYFSLSDKDANSNGVERSSFYSGGWQEGSSSPRSHLSPEQGTGIISGKSWNKYNYHPASQKNTQQPLAKHEPRKESIKKTKHLRLSQPSEVTHYKSSKREVRTSDSSSHVSQSEEQAQIDAEMDSTPVGYQYGQGSDVTSKSFPDDLPRMRFKCPYCTHVVKRKADLKRHLRCHTGERPYPCQACGKRFSRLDHLSSHFRTIHQACKLICRKCKRHVTDLTGQVVQEGTRRYRLCNECLAEFGIDSLPIDLEAEQHLMSPSDGDKDSRWHLSEDENRSYVEIVEDGSGDLVIQQVDDSEEEEEKEIKPNIR

SEQ ID NO: 347 - protein, 147 aa, Homo sapiens
MTSQPISNETIIMLPSNVINFSQAEKPEPTNQGQDSLKKRLQAKVKVIGVHSSLAGSILSALSALVGFILLSVNPAALNPASLQCKLDEKDIPTRLLLSYDYHSPYTMDCHRAKASLAGTLSLMLVSTVLEFCLAVLTAVLQWKQTV

SEQ ID NO: 348 - protein, 549 aa, Homo sapiens
PLTLADFEAINRCNRPLPKNFNFAADVLDQWSQKEKTGERPANPALWWVNGKGDEVKWSFRELGSLSRKAANVLTKPCGLQRGDRLAVILPRIPEWWLVNVACIRTGIIFMPGTIQLTAKDILYRLRASKAKCIVASEEVAPAVESIVLECPDLKTKLLVSPQSWNGWLSFQELFQFASEEHSCVETGSQEPMTIYFTSGTTGFPKMAQHSQSSLGIGFTLCGRYWLDLKSSDIIWNMSDTGWVKAAIGSVFSSWLCGACVFVHRMAQFDTDTFLDTLTTYPITTLCSPPTVYRMLVQKDLKRYKFKSLRHCLTGGEPLNPEVLEQWRVQTGLELYEGYGQTEVGMICANQKGQEIKPGSMGKGMLPYDVQIIDENGNVLPPGKEGEIALRLKPTRPFCFFSNYLDNPQKTAATIRGDFYVTGDRGVMDSDGYFWFVGRADDVIISSGYRIGPFEVESALIEHPAVVESAVVSSPDQIRGEVVKAFVVLAAPFKSYNPEKLTLELQDHVKKSTAPYKYPRKVEFVQELPKTITGKIKRNVLRDQEWRGR

SEQ ID NO: 349 - protein, 436 aa, Homo sapiens
MSDSTWMSADPHLASSLSPSQDERMRSPQNLHSQEDDDSSSESGSGNGSSTLNPSTSSSTQGDPAFPEMNGNGAVAPMDFTTAAEDQPINLCDKLPPATALGTASYPSDGCGADGLRSRVKYGVKTTPESPPYSSGSYDSIKTEVSGCPEDLTVGRAPTADDDDDDHDDHEDNDKMNDSEGMDPERLKAFNMFVRLFVDENLDRMVPISKQPKEKIQAIIESCSRQFPEFQERARKRIRTYLKSCRRMKKNGMEMTRPTPPHLTSAMAENILAAACESETRKAAKRMRLEIYQSSQDEPIALDKQHSRDSAAITHSTYSLPASSYSQDPVYANGGLNYSYRGYGALSSNLQPPASLQTGNHSNGPTDLSMKGGASTTSTTPTPTPSSTSTSRPVPTAQLSPTEISAVRQLIAGYRESAAFLLRSADELENLILQQN

SEQ ID NO: 350 - protein, 239 aa, Homo sapiens
MECLCSDGFAFPHYYIKPYHLKRIHRAVLRGNLEKLKYLLLTYYDANKRDRKERTALHLACATGQPEMVHLLVSRRCELNLCDREDRTPLIKAVQLRQEACATLLLQNGADPNITDFFGRTALHYAVYNEDTSMIEKLLSHGTNIEECSKNEYQPLLLAVSRRKVKMVEFLLKKKANVNAIDYLGRSALILAVTLGEKDIVILLLQHNIDVFSRDVYGKLAEDYASEAENRVVSSETTS

SEQ ID NO: 351 - protein, 263 aa, Homo sapiens
MGQTALAGGSSSTPTPQALYPDLSCPEGLEELLSAPPPDLGAQRRHGWNPKDCSENIEVKEGGLYFERRPVAQSTDGARGKRGYSRGLHAWEISWPLEQRGTHAVVGVATALAPLQTDHYAALLGSNSESWGWDIGRGKLYHQSKGPGAPQYPAGTQGEQLEVPERLLVVLDMEEGTLGYAIGGTYLGPAFRGLKGRTLYPAVSAVWGQCQVRIRYLGERRAEPHSLLHLSRLCVRHNLGDTRLGQVSALPLPPAMKRYLLYQ

SEQ ID NO: 352 - protein, 715 aa, Homo sapiens
MDLILNRMDYLQVGVTSQKTMKLIPASRHRATQKVVIGDHDGVVMCFGMKKGEAAAVFKTLPGPKIARLELGGVINTPQEKIFIAAASEIRGFTKRGKQFLSFETNLTESIKAMHISGSDLFLSASYIYNHYCDCKDQHYYLSGDKINDVICLPVERLSRITPVLACQDRVLRVLQGSDVMYAVEVPGPPTVLALHNGNGGDSGEDLLFGTSDGKLALIQITTSKPVRKWEIQNEKKRGGILCIDSFDIVGDGVKDLLVGRDDGMVEVYSFDNANEPVLRFDQMLSESVTSIQGGCVGKDSYDEIVVSTYSGWVTGLTTEPIHKESGPGEELKINQEMQNKISSLRNELEHLQYKVLQERENYQQSSQSSKAKSAVPSFGINDKFTLNKDDASYSLILEVQTAIDNVLIQSDVPIDLLDVDKNSAVVSFSSCDSESNDNFLLATYRCQADTTRLELKIRSIEGQYGTLQAYVTPRIQPKTCQVRQYHIKPLSLHQRTHFIDHDRPMNTLTLTGQFSFAEVHSWVVFCLPEVPEKPPAGECVTFYFQNTFLDTQLESTYRKGEGVFKSDNISTISILKDVLSKEATKRKINLNISYEINEVSVKHTLKLIHPKLEYQLLLAKKVQLIDALKELQIHEGNTNFLIPEYHCILEEADHLQEEYKKQPAHLERLYGMITDLFIDKFKFKGTNVKTKVPLLLEILDSYDQNALISFFDAA

SEQ ID NO: 353 - protein, 987 aa, Homo sapiens
MALRRLGAALLLLPLLAAVEETLMDSTTATAELGWMVHPPSGWEEVSGYDENMNTIRTYQVCNVFESSQNNWLRTKFIRRRGAHRIHVEMKFSVRDCSSIPSVPGSCKETFNLYYYEADFDSATKTFPNWMENPWVKVDTIAADESFSQVDLGGRVMKINTEVRSFGPVSRSGFYLAFQDYGGCMSLIAVRVFYRKCPRIIQNGAIFQETLSGAESTSLVAARGSCIANAEEVDVPIKLYCNGDGEWLVPIGRCMCKAGFEAVENGTVCRGCPSGTFKANQGDEACTHCPINSRTTSEGATNCVCRNGYYRADLDPLDMPCTTIPSAPQAVISSVNETSLMLEWTPPRDSGGREDLVYNIICKSCGSGRGACTRCGDNVQYAPRQLGLTEPRIYISDLLAHTQYTFEIQAVNGVTDQSPFSPQFASVNITTNQAAPSAVSIMHQVSRTVDSITLSWSQPDQPNGVILDYELQYYEKELSEYNATAIKSPTNTVTVQGLKAGAIYVFQVRARTVAGYGRYSGKMYFQTMTEAEYQTSIQEKLPLIIGSSAAGLVFLIAVVVIAIVCNRRRGFERADSEYTDKLQHYTSGHMTPGMKIYIDPFTYEDPNEAVREFAKEIDISCVKIEQVIGAGEFGEVCSGHLKLPGKREIFVAIKTLKSGYTEKQRRDFLSEASIMGQFDHPNVIHLEGVVTKSTPVMIITEFMENGSLDSFLRQNDGQFTVIQLVGMLRGIAAGMKYLADMNYVHRDLAARNILVNSNLVCKVSDFGLSRFLEDDTSDPTYTSALGGKIPIRWTAPEAIQYRKFTSASDVWSYGIVMWEVMSYGERPYWDMTNQDVINAIEQDYRLPPPMDCPSALHQLMLDCWQKDRNHRPKFGQIVNTLDKMIRNPNSLKAMAPLSSGINLPLLDRTIPDYTSFNTVDEWLEAIKMGQYKESFANAGFTSFDVVSQMMMEDILRVGVTLAGHQKKILNSIQVMRAQMNQIQSVEV

SEQ ID NO: 354 - protein, 162 aa, Homo sapiens
MALARPRPRLGDLIEISRFGYAHWAIYVGDGYVVHLAPASEIAGAGAASVLSALTNKAIVKKELLSVVAGGDNYRVNNKHDDRYTPLPSNKIVKRAEELVGQELPYSLTSDNCEHFVNHLRYGVSRSDQVTGAVTTVGVAAGLLAAASLVGILLARSKRERQ

SEQ ID NO: 355 - protein, 257 aa, Homo sapiens
MGTVRPPRPSLLLVSTRESCLFLLFCLHLGAACPQPCRCPDHAGAVAVFCSLRGLQEVPEDIPANTVLLKLDANKISHLPDGAFQHLHRLRELDLSHNAIEAIGSATFAGLAGGLRLLDLSYNRIQRIPKDALGKLSAKIRLSHNPLHCECALQEALWELKLDPDSVDEIACHTSVQEEFVGKPLVQALDAGASLCSVPHRTTDVAMLVTMFGWFAMVIAYVVYYVRHNQEDARRHLEYLKSLPSAPASKDPIGPGP

SEQ ID NO: 356 - protein, 1140 aa, Homo sapiens
MTTAVERKYINIRKRLDQLGYRQTLTVECLPLVEKLFSDLVHTTESLRQSKLSAVKAEKESANFDFVLEPYKLENARLSRENNELYLELMKLREHSDQHVKELKTSLKKCARETADLKFLNNQYAHKLKLLEKESKAKNERIQQLQEKNLHAVVQTPGGKKRSIAFRRQRMQIDEPVPPSEVSSYPVPQPDDPYIADLLQVADNRIQELQQEVHQLQEKLAMMESGVRDYSKQIELREREIERLSVALDGGRSPDVLSLESRNKTNEKLIAHLNIQVDFLQQANKDLEKRIRELMETKETVTSEVVNLSNKNEKLCQELTEIDQLAQQLERHKEEVLETADKELGEAKKEIKRKLSEMQDLEETMAKLQLELNLCQKEKERLSDELLVKSDLETVVHQLEQEKQRLSKKVESFAVTERQLTLEVERMRLEHGIKRRDRSPSRLDTFLKGIEEERDYYKKELERLQHIIQRRSCSTSYSAREKSSIFRTPEKGDYNSEIHQITRERDELQRMLERFEKYMEDIQSNVKLLTAERDKLSVLYNEAQEELSALRKESTQTTAPHNIVSLMEKEKELALSDLRRIMAEKEALREKLEHIEEVSLFGKSELEKTIEHLTCVNHQLESEKYELKSKVLIMKETIESLENKLKVQAQKFSHVAGDSSHQKTEVNSLRIVNEQLQRSVDDYQHRLSIKRGELESAQAQIKILEEKIDELNLKMTSQDEEAHVMKKTIGVIDKEKDFLQETVDEKTEKIANLQENLANKEKAVAQMKIMISECESSVNQLKETLVNRDREINSLRRQLDAAHKELDEVGRSREIAFKENRRLQDDLATMARENQEISLELEAAVQEKEEMKSRVHKYITEVSRWESLMAAKEKENQDLLDRFQMLHNRAEDWEVKAHQAEGESSSVRLELLSIDTERRHLRERVELLEKEIQEHINAHHAYESQISSMAKAMSRLEEELRHQEDEKATVLNDLSSLRELCIKLDSGKDIMTQQLNSKNLEFERVVVELENVKSESDLLKKQLSNERHTVKNLESLLATNRDKEFHSHLTSHEKDTEIQLLKEKLTLSESKLTSQSRENTMLRAKVAQLQTDYDALKRQISTERYERERAIQEMRRHGLATPPLSSTLRSPSHSPEHRNV

SEQ ID NO: 357 - protein, 273 aa, Homo sapiens
MAFLAGPRLLDWASSPPHLQFNKFVLTGYRPASSGSGCLRSLFYLHNELGNIYTHGLALLGFLVLVPMTMPWGQLGKDGWLGGTHCVACLAPPAGSVLYHLFMCHQGGSAVYARLLALDMCGVCLVNTLGALPIIHCTLACRPWLRPAALVGYTVLSGVAGWRALTAPSTSARLRAFGWQAAARLLVFGARGVGLGSGAPGSLPCYLRMDALALLGGLVNVARLPERWGPGRFDYWGNSHQIMHLLSVGSILQLHAGVVPDLLWAAHHACPRD

SEQ ID NO: 358 - protein, 1165 aa, Homo sapiens
MEQDRTNHVEGNRLSPFLIPSPPICQTEPLATKLQNGSPLPERAHPEVNGDTKWHSFKSYYGIPCMKGSQNSRVSPDFTQESRGYSKCLQNGGIKRTVSEPSLSGLLQIKKLKQDQKANGERRNFGVSQERNPGESSQPNVSDLSDKKESVSSVAQENAVKDFTSFSTHNCSGPENPELQILNEQEGKSANYHDKNIVLLKNKAVLMPNGATVSASSVEHTHGELLEKTLSQYYPDCVSIAVQKTTSHINAINSQATNELSCEITHPSHTSGQINSAQTSNSELPPKPAAVVSEACDADDADNASKLAAMLNTCSFQKPEQLQQQKSVFEICPSPAENNIQGTTKLASGEEFCSGSSSNLQAPGGSSERYLKQNEMNGAYFKQSSVFTKDSFSATTTPPPPSQLLLSPPPPLPQVPQLPSEGKSTLNGGVLEEHHHYPNQSNTTLLREVKIEGKPEAPPSQSPNPSTHVCSPSPMLSERPQNNCVNRNDIQTAGTMTVPLCSEKTRPMSEHLKHNPPIFGSSGELQDNCQQLMRNKEQEILKGRDKEQTRDLVPPTQHYLKPGWIELKAPRFHQAESHLKRNEASLPSILQYQPNLSNQMTSKQYTGNSNMPGGLPRQAYTQKTTQLEHKSQMYQVEMNQGQSQGTVDQHLQFQKPSHQVHFSKTDHLPKAHVQSLCGTRFHFQQRADSQTEKLMSPVLKQHLNQQASETEPFSNSHLLQHKPHKQAAQTQPSQSSHLPQNQQQQQKLQIKNKEEILQTFPHPQSNNDQQREGSFFGQTKVEECFHGENQYSKSSEFETHNVQMGLEEVQNINRRNSPYSQTMKSSACKIQVSCSNNTHLVSENKEQTTHPELFAGNKTQNLHHMQYFPNNVIPKQDLLHRCFQEQEQKSQQASVLQGYKNRNQDMSGQQAAQLAQQRYLIHNHANVFPVPDQGGSHTQTPPQKDTQKHAALRWHLLQKQEQQQTQQPQTESCHSQMHRPIKVEPGCKPHACMHTAPPENKTWKKVTKQENPPASCDNVQQKSIIETMEQHLKQFHAKSLFDHKALTLKSQKQVKVEMSGPVTVLTRQTTAAELDSHTPALEQQTTSSEKTPTKRTAASVLNNFIESPSKLLDTPIKNLLDTPVKTQYDFPSCRCVGKCQKCTETHGVYPELANLSSDMGFSFFF

SEQ ID NO: 359 - protein, 394 aa, Homo sapiens
MALLDLALEGMAVFGFVLFLVLWLMHFMAIIYTRLHLNKKATDKQPYSKLPGVSLLKPLKGVDPNLINNLETFFELDYPKYEVLLCVQDHDDPAIDVCKKLLGKYPNVDARLFIGGKKVGINPKINNLMPGYEVAKYDLIWICDSGIRVIPDTLTDMVNQMTEKVGLVHGLPYVADRQGFAATLEQVYFGTSHPRYYISANVTGFKCVTGMSCLMRKDVLDQAGGLIAFAQYIAEDYFMAKAIADRGWRFAMSTQVAMQNSGSYSISQFQSRMIRWTKLRINMLPATIICEPISECFVASLIIGWAAHHVFRWDIMVFFMCHCLAWFIFDYIQLRGVQGGTLCFSKLDYAVAWFIRESMTIYIFLSALWDPTISWRTGRYRLRCGGTAEEILDV

SEQ ID NO: 360 - protein, 494 aa, Homo sapiens
MLASGLLLVTLLACLTVMVLMSVWRQRKSRGKLPPGPTPLPFIGNYLQLNTEQMYNSLMKISERYGPVFTIHLGPRRVVVLCGHDAVKEALVDQAEEFSGRGEQATFDWLFKGYGVAFSNGERAKQLRRFSIATLRGFGVGKRGIEERIQEEAGFLIDALRGTHGANIDPTFFLSRTVSNVISSIVFGDRFDYEDKEFLSLLRMMLGSFQFTATSTGQLYEMFSSVMKHLPGPQQQAFKELQGLEDFIAKKVEHNQRTLDPNSPRDFIDSFLIRMQEEEKNPNTEFYLKNLVMTTLNLFFAGTETVSTTLRYGFLLLMKHPEVEAKVHEEIDRVIGKNRQPKFEDRAKMPYTEAVIHEIQRFGDMLPMGLAHRVNKDTKFRDFFLPKGTEVFPMLGSVLRDPRFFSNPRDFNPQHFLDKKGQFKKSDAFVPFSIGKRYCFGEGLARMELFLFFTTIMQNFRFKSPQSPKDIDVSPKHVGFATIPRNYTMSFLPR

SEQ ID NO: 361 - protein, 592 aa, Homo sapiens
AAAAGAGNRAAVAVAVARADEAEAPFAGQNWLKSYGYLLPYDSRASALHSAKALQSAVSTMQQFYGIPVTGVLDQTTIEWMKKPRCGVPDHPHLSRRRRNKRYALTGQKWRQKHITYSIHNYTPKVGELDTRKAIRQAFDVWQKVTPLTFEEVPYHEIKSDRKEADIMIFFASGFHGDSSPFDGEGGFLAHAYFPGPGIGGDTHFDSDEPWTLGNANHDGNDLFLVAVHELGHALGLEHSSDPSAIMAPFYQYMETHNFKLPQDDLQGIQKIYGPPAEPLEPTRPLPTLPVRRIHSPSERKHERQPRPPRPPLGDRPSTPGTKPNICDGNFNTVALFRGEMFVFKDRWFWRLRNNRVQEGYPMQIEQFWKGLPARIDAAYERADGRFVFFKGDKYWVFKEVTVEPGYPHSLGELGSCLPREGIDTALRWEPVGKTYFFKGERYWRYSEERRATDPGYPKPITVWKGIPQAPQGAFISKEGYYTYFYKGRDYWKFDNQKLSVEPGYPRNILRDWMGCNQKEVERRKERRLPQDDVDIMVTINDVPGSVNAVAVVIPCILSLCILVLVYTIFQFKNKTGPQPVTYYKRPVQEWV

SEQ ID NO: 362 - protein, 954 aa, Homo sapiens
MEAGGLPLELWRMILAYLHLPDLGRCSLVCRAWYELILSLDSTRWRQLCLGCTECRHPNWPNQPDVEPESWREAFKQHYLASKTWTKNALDLESSICFSLFRRRRERRTLSVGPGREFDSLGSALAMASLYDRIVLFPGVYEEQGEIILKVPVEIVGQGKLGEVALLASIDQHCSTTRLCNLVFTPAWFSPIMYKTTSGHVQFDNCNFENGHIQVHGPGTCQVKFCTFKNTHIFLHNVPLCVLENCEFVGSENNSVTVEGHPSADKNWAYKYLLGLIKSSPTFLPTEDSDFLMSLDLESRDQAWSPKTCDIVIEGSQSPTSPASSSPKPGSKAGSQEAEVGSDGERVAQTPDSSDGGLSPSGEDEDEDQLMYRLSYQVQGPRPVLGGSFLGPPLPGASIQLPSCLVLNSLQQELQKDKEAMALANSVQGCLIRKCLFRDGKGGVFVCSHGRAKMEGNIFRNLTYAVRCIHNSKIIMLRNDIYRCRASGIFLRLEGGGLIAGNNIYHNAEAGVDIRKKSNPLCNQIHHGLRSGIVVLGNGKGIIRNNQIFSNKEAGIYILYHGNPVVSGNHIFKGRAAGIAVNENGKGLITENVIRENQWGGVDIRRGGIPVLRSNLICFGYSDGVVVGDEGKGLIEGNTIYANKGCGVWMMSSSLPHVTSNHVSYNGLYGVAVFSQKDGSSELPRGHRAQENFSEDGDAILWETELEKEDDPLRRPITIALVESNSINHNGASGLYVQSSEALHVITNVIHANGDRGITVAQSSQPTRVANNSISCNRQSGVKVEAQCKVELRGNGIYDNRGHGIITKGDSTIVIENDIIGNRGSGLQLLPRSDTKVIKNRIHSFRAYGIAVRGRAKALVQENIIFQGKTSKTIFQQISNNRECIMQNNKFLVFKKKSDTWRLVNPPARPHLENSLRRPSAAHNGQKVTAMATRITARVEGGYHSNRSVFCTIL

SEQ ID NO: 363 - protein, 301 aa, Homo sapiens
MATTKRVLYVGGLAEEVDDKVLHAAFIPFGDITDIQIPLDYETEKHRGFAFVEFELAEDAAAAIDNMNESELFGRTIRVNLAKPMRIKEGSSRPVWSDDDWLKKFSGKTLEENKEEEGSEPPKAETQEGEPIAKKARSNPQVYMDIKIGNKPAGRIQMLLRSDVVPMTAENFRCLCTHEKGFGFKGSSFHRIIPQFMCQGGDFTNHNGTGGKSIYGKKFDDENFILKHTGPGLLSMANSGPNTNGSQFFLTCDKTDWLDGKHVVFGEVTEGLDVLRQIEAQGSKDGKPKQKVIIADCGEYV

SEQ ID NO: 364 - protein, 131 aa, Homo sapiens
MDFQQLADVAEKWCSNTPFELIATEETERRMDFYADPGVSFYVLCPDNGCGDNFHVWSESEDCLPFLQLAQDYISSCGKKTLHEVLEKVFKSFRPLLGLPDADDDAFEEYSADVEEEEPEADHPQMGVSQQ

SEQ ID NO: 365 - protein, 170 aa, Homo sapiens
MKTLFLGVTLGLAAALSFTLEEEDITGTWYVKAMVVDKDFPEDRRPRKVSPVKVTALGGGKLEATFTFMREDRCIQKKILMRKTEEPGKYSAYGGRKLMYLQELPRRDHYIFYCKDQHHGGLLHMGKLVGRNSDTNREALEEFKKLVQRKGLSEEDIFTPLQTGSCVPEH

SEQ ID NO: 366 - protein, 2725 aa, Homo sapiens
MMNNSGYSDAGLGLGDETDEMPSTEKDLAEDAPWKKIQQNTFTRWCNEHLKCVGKRLTDLQRDLSDGLRLIALLEVLSQKRMYRKFHPRPNFRQMKLENVSVALEFLEREHIKLVSIDSKAIVDGNLKLILGLIWTLILHYSISMPMWEDEDDEDARKQTPKQRLLGWIQNKVPQLPITNFNRDWQDGKALGALVDNCAPGLCPDWEAWDPNQPVENAREAMQQADDWLGVPQVIAPEEIVDPNVDEHSVMTYLSQFPKAKLKPGAPVRSKQLNPKKAIAYGPGIEPQGNTVLQPAHFTVQTVDAGVGEVLVYIEDPEGHTEEAKVVPNNDKDRTYAVSYVPKVAGLHKVTVLFAGQNIERSPFEVNVGMALGDANKVSARGPGLEPVGNVANKPTYFDIYTAGAGTGDVAVVIVDPQGRRDTVEVALEDKGDSTFRCTYRPAMEGPHTVHVAFAGAPITRSPFPVHVSEACNPNACRASGRGLQPKGVRVKEVADFKVFTKGAGSGELKVTVKGPKGTEEPVKVREAGDGVFECEYYPVVPGKYVVTITWGGYAIPRSPFEVQVSPEAGVQKVRAWGPGLETGQVGKSADFVVEAIGTEVGTLGFSIEGPSQAKIECDDKGDGSCDVRYWPTEPGEYAVHVICDDEDIRDSPFIAHILPAPPDCFPDKVKAFGPGLEPTGCIVDKPAEFTIDARAAGKGDLKLYAQDADGCPIDIKVIPNGDGTFRCSYVPTKPIKHTIIISWGGVNVPKSPFRVNVGEGSHPERVKVYGPGVEKTGLKANEPTYFTVDCSEAGQGDVSIGIKCAPGVVGPAEADIDFDIIKNDNDTFTVKYTPPGAGRYTIMVLFANQEIPASPFHIKVDPSHDASKVKAEGPGLNRTGVEVGKPTHFTVLTKGAGKAKLDVQFAGTAKGEVVRDFEIIDNHDYSYTVKYTAVQQGNMAVTVTYGGDPVPKSPFVVNVAPPLDLSKIKVQGLNSKVAVGQEQAFSVNTRGAGGQGQLDVRMTSPSRRPIPCKLEPGGGAEAQAVRYMPPEEGPYKVDITYDGHPVPGSPFAVEGVLPPDPSKVCAYGPGLKGGLVGTPAPFSIDTKGAGTGGLGLTVEGPCEAKIECQDNGDGSCAVSYLPTEPGEYTINILFAEAHIPGSPFKATIRPVFDPSKVRASGPGLERGKVGEAATFTVDCSEAGEAELTIEILSDAGVKAEVLIHNNADGTYHITYSPAFPGTYTITIKYGGHPVPKFPTRVHVQPAVDTSGVKVSGPGVEPHGVLREVTTEFTVDARSLTATGGNHVTARVLNPSGAKTDTYVTDNGDGTYRVQYTAYEEGVHLVEVLYDEVAVPKSPFRVGVTEGCDPTRVRAFGPGLEGGLVNKANRFTVETRGAGTGGLGLAIEGPSEAKMSCKDNKDGSCTVEYIPFTPGDYDVNITFGGRPIPGSPFRVPVKDVVDPGKVKCSGPGLGAGVRARVPQTFTVDCSQAGRAPLQVAVLGPTGVAEPVEVRDNGDGTHTVHYTPATDGPYTVAVKYADQEVPRSPFKIKVLPAHDASKVRASGPGLNASGIPASLPVEFTIDARDAGEGLLTVQILDPEGKPKKANIRDNGDGTYTVSYLPDMSGRYTITIKYGGDEIPYSPFRIHALPTGDASKCLVTVSIGGHGLGACLGPRIQIGQETVITVDAKAAGEGKVTCTVSTPDGAELDVDVVENHDGTFDIYYTAPEPGKYVITIRFGGEHIPNSPFHVLACDPLPHEEEPSEVPQLRQPYAPPRPGARPTHWATEEPVVPVEPMESMLRPFNLVIPFAVQKGELTGEVRMPSGKTARPNITDNKDGTITVRYAPTEKGLHQMGIKYDGNHIPGSPLQFYVDAINSRHVSAYGPGLSHGMVNKPATFTIVTKDAGEGGLSLAVEGPSKAEITCKDNKDGTCTVSYLPTAPGDYSIIVRFDDKHIPGSPFTAKITGDDSMRTSQLNVGTSTDVSLKITESDLSQLTASIRAPSGNEEPCLLKRLPNRHIGISFTPKEVGEHVVSVRKSGKHVTNSPFKILVGPSEIGDASKVRVWGKGLSEGHTFQVAEFIVDTRNAGYGGLGLSIEGPSKVDINCEDMEDGTCKVTYCPTEPGTYIINIKFADKHVPGSPFTVKVTGEGRMKESITRRRQAPSIATIGSTCDLNLKIPGNWFQMVSAQERLTRTFTRSSHTYTRTERTEISKTRGGETKREVRVEESTQVGGDPFPAVFGDFLGRERLGSFGSITRQQEGEASSQDMTAQVTSPSGKVEAAEIVEGEDSAYSVRFVPQEMGPHTVAVKYRGQHVPGSPFQFTVGPLGEGGAHKVRAGGTGLERGVAGVPAEFSIWTREAGAGGLSIAVEGPSKAEIAFEDRKDGSCGVSYVVQEPGDYEVSIKFNDEHIPDSPFVVPVASLSDDARRLTVTSLQETGLKVNQPASFAVQLNGARGVIDARVHTPSGAVEECYVSELDSDKHTIRFIPHENGVHSIDVKFNGAHIPGSPFKIRVGEQSQAGDPGLVSAYGPGLEGGTTGVSSEFIVNTLNAGSGALSVTIDGPSKVQLDCRECPEGHVVTYTPMAPGNYLIAIKYGGPQHIVGSPFKAKVTGPRLSGGHSLHETSTVLVETVTKSSSSRGSSYSSIPKFSSDASKVVTRGPGLSQAFVGQKNSFTVDCSKAGTNMMMVGVHGPKTPCEEVYVKHMGNRVYNVTYTVKEKGDYILIVKWGDESVPGSPFKVKVP

SEQ ID NO: 367 - protein, 176 aa, Homo sapiens
MAMSFEWPWQYRFPPFFTLQPNVDTRQKQLAAWCSLVLSFCRLHKQSSMTVMEAQESPLFNNVKLQRKLPVESIQIVLEELRKKGNLEWLDKSKSSFLIMWRRPEEWGKLIYQWVSRSGQNNSVFTLYELTNGEDTEDEEFHGLDEATLLRALQALQQEHKAEIITVSDGRGVKFF

SEQ ID NO: 368 - protein, 167 aa, Homo sapiens
MASPRTVTIVALSVALGLFFVFMGTIKLTPRLSKDAYSEMKRAYKSYVRALPLLKKMGINSILLRKSIGALEVACGIVMTLVPGRPKDVANFFLLLLVLAVLFFHQLVGDPLKRYAHALVFGILLTCRLLIARKPEDRSSEKKPLPGNAEEQPSLYEKAPQGKVKVS

SEQ ID NO: 369 - protein, 123 aa, Homo sapiens
MSTLSNFTQTLEDVFRRIFITYMDNWRQNTTAEQEALQAKVDAENFYYVILYLMVMIGMFSFIIVAILVSTVKSKRREHSNDPYHQYIVEDWQEKYKSQILNLEESKATIHENIGAAGFKMSP

SEQ ID NO: 370 - protein, 712 aa, Homo sapiens
MQPGSAPPPGRMDPSAPQPRAETSGKDIWHPGERCLAPSPDNGKLCEASIKSITVDENGKSFAVVLYADFQERKIPLKQLQEVKFVKDCPRNLIFDDEDLEKPYFPNRKFPSSSVAFKLSDNGDSIPYTINRYLRDYQREGTRFLYGHYIHGGGCILGDDMGLGKTVQVISFLAAVLHKKGTREDIENNMPEFLLRSMKKEPLSSTAKKMFLIVAPLSVLYNWKDELDTWGYFRVTVLHGNRKDNELIRVKQRKCEIALTTYETLRLCLDELNSLEWSAVIVDEAHRIKNPKARVTEVMKALKCNVRIGLTGTILQNNMKELWCVMDWAVPGLLGSGTYFKKQFSDPVEHGQRHTATKRELATGRKAMQRLAKKMSGWFLRRTKTLIKDQLPKKEDRMVYCSLTDFQKAVYQTVLETEDVTLILQSSEPCTCRSGQKRRNCCYKTNSHGETVKTLYLSYLTVLQKVANHVALLQAASTSKQQETLIKRICDQVFSRFPDFVQKSKDAAFETLSDPKYSGKMKVLQQLLNHCRKNRDKVLLFSFSTKLLDVLQQYCMASGLDYRRLDGSTKSEERLKIVKEFNSTQDVNICLVSTMAGGLGLNFVGANVVVLFDPTWNPANDLQAIDRAYRIGQCRDVKVLRLISLGTVEEIMYLRQIYKQQLHCVVVGSENAKRYFEAVQGSKEHQGELFGIHNLFKFRSQGSCLTKDILEV

SEQ ID NO: 371 - protein, 356 aa, Homo sapiens
MHHQWLLLAACFWVIFMFMVASKFITLTFKDPDVYSAKQEFLFLTTMPEVRKLPEEKHIPEELKPTGKELPDSQLVQPLVYMERLELIRNVCRDDALKNLSHTPVSKFVLDRIFVCDKHKILFCQTPKVGNTQWKKVLIVLNGAFSSIEEIPENVVHDHEKNGLPRLSSFSDAEIQKRLKTYFKFFIVRDPFERLISAFKDKFVHNPRFEPWYRHEIAPGIIRKYRRNRTETRGIQFEDFVRYLGDPNHRWLDLQFGDHIIHWVTYVELCAPCEIMYSVIGHHETLEDDAPYILKEAGIDHLVSYPTIPPGITVYNRTKVEHYFLGISKRDIRRLYARFEGDFKLFGYQKPDFLLN

SEQ ID NO: 372 - protein, 178 aa, Homo sapiens
MPKAKGKTRRQKFGYSVNRKRLNRNARRKAAPRIECSHIRHAWDHAKSVRQNLAEMGLAVDPNRAVPLRKRKVKAMEVDIEERPKELVRKPYVLNDLEAEASLPEKKGNTLSRDLIDYVRYMVENHGEDYKAMARDEKNYYQDTPKQIRSKINVYKRFYPAEWQDFLDSLQKRKMEVE

SEQ ID NO: 373 - protein, 664 aa, Homo sapiens
MKRRNADCSKLRRPLKRNRITEGIYGSTFLYLKFLVVWALVLLADFVLEFRFEYLWPFWLFIRSVYDSFRYQGLAFSVFFVCVAFTSNIICLLFIPIQWLFFAASTYVWVQYVWHTERGVCLPTVSLWILFVYIEAAIRFKDLKNFHVDLCRPFAAHCIGYPVVTLGFGFKSYVSYKMRLRKQKEVQKENEFYMQLLQQALPPEQQMLQKQEKEAEEAAKGLPDMDSSILIHHNGGIPANKKLSTTLPEIEYREKGKEKDKDAKKHNLGINNNNILQPVDSKIQEIEYMENHINSKRLNNDLVGSTENLLKEDSCTASSKNYKNASGVVNSSPRSHSATNGSIPSSSSKNEKKQKCTSKSPSTHKDLMENCIPNNQLSKPDALVRLEQDIKKLKADLQASRQVEQELRSQISSLSSTERGIRSEMGQLRQENELLQNKLHNAVQMKQKDKQNISQLEKKLKAEQEARSFVEKQLMEEKKRKKLEEATAARAVAFAAASRGECTETLRNRIRELEAEGKKLTMDMKVKEDQIRELELKVQELRKYKENEKDTEVLMSALSAMQDKTQHLENSLSAETRIKLDLFSALGDAKRQLEIAQGQILQKDQEIKDLKQKIAEVMAVMPSITYSAATSPLSPVSPHYSSKFVETSPSGLDPNASVYQPLKK

SEQ ID NO: 374 - protein, 393 aa, Homo sapiens
MDENESNQSLMTSSQYPKEAVRKRQNSARNSGASDSSRFSRKSFKLDYRLEEDVTKSKKGKDGRFVNPWPTWKNPSIPNVLRWLIMEKDHSSVPSSKEELDKELPVLKPYFITNPEEAGVREAGLRVTWLGHATVMVEMDELIFLTDPIFSSRASPSQYMGPKRFRRSPCTISELPPIDAVLISHNHYDHLDYNSVIALNERFGNELRWFVPLGLLDWMQKCGCENVIELDWWEENCVPGHDKVTFVFTPSQHWCKRTLMDDNKVLWGSWSVLGPWNRFFFAGDTGYCPAFEEIGKRFGPFDLAAIPIGAYEPRWFMKYQHVDPEEAVRIHTDVQTKKSMAIHWGTFALANEHYLEPPVKLNEALERYGLNAEDFFVLKHGESRYLNNDDENF

SEQ ID NO: 375 - protein, 591 aa, Homo sapiens
MWERLNCAAEDFYSRLLQKFNEEKKGIRKDPFLYEADVQVQLISKGQPNPLKNILNENDIVFIVEKVPLEKEETSHIEELQSEETAISDFSTGENVGPLALPVGKARQLIGLYTMAHNPNMTHLKINLPVTALPPLWVRCDSSDPEGTCWLGAELITTNNSITGIVLYVVSCKADKNYSVNLENLKNLHKKRHHLSTVTSKGFAQYELFKSSALDDTITASQTAIALDISWSPVDEILQIPPLSSTATLNIKVESGEPRGPLNHLYRELKFLLVLADGLRTGVTEWLEPLEAKSAVELVQEFLNDLNKLDGFGDSTKKDTEVETLKHDTAAVDRSVKRLFKVRSDLDFAEQLWCKMSSSVISYQDLVKCFTLIIQSLQRGDIQPWLHSGSNSLLSKLIHQSYHGTMDTVSLSGTIPVQMLLEIGLDKLKKDYISFFIGQELASLNHLEYFIAPSVDIQEQVYRVQKLHHILEILVSCMPFIKSQHELLFSLTQICIKYYKQNPLDEQHIFQLPVRPTAVKNLYQSEKPQKWRVEIYSGQKKIKTVWQLSDSSPIDHLNFHKPDFSELTLNGSLEERIFFTNMVTCSQVHFK

SEQ ID NO: 376 - protein, 514 aa, Homo sapiens
MYSQRFGTVQREVKGPTPKVVIVRSKPPKGQGAEHHLERIRRSHQKHNAILASIKSSERDRLKAEWDQHNDCKILDSLVRARIKDAVQGFIINIEERRNKLRELLALEENEYFTEMQLKKETIEEKKDRMREKTKLLKEKNEKERQDFVAEKLDQQFRERCEELRVELLSIHQKKVCEERKAQIAFNEELSRQKLVEEQMFSKLWEEDRLAKEKREAQEARRQKELMENTRLGLNAQITSIKAQRQATQLLKEEEARLVESNNAQIKHENEQDMLKKQKAKQETRTILQKALQERIEHIQQEYRDEQDLNMKLVQRALQDLQEEADKKKQKREDMIREQKIYHKYLAQRREEEKAQEKEFDRILEEDKAKKLAEKDKELRLEKEARRQLVDEVMCTRKLQVQEKLQREAKEQEERAMEQKHINESLKELNCEEKENFARRQRLAQEYRKQLQMQIAYQQQSQEAEKEEKRREFEAGVAANKMCLDKVQEVLSTHQVLPQNIHPMRKACPSKLPP

SEQ ID NO: 377 - protein, 432 aa, Homo sapiens
MPAGRAARTCALLALCLLGAGAQDFGPTRFICTSVPVDADMCAASVAAGGAEELRSSVLQLRETVLQQKETILSQKETIRELTAKLGRCESQSTLDPGAGEARAGGGRKQPGSGKNTMGDLSRTPAAETLSQLGQTLQSLKTRLENLEQYSRLNSSSQTNSLKDLLQSKIDELERQVLSRVNTLEEGKGGPRNDTEERVKIETALTSLHQRISELEKGQKDNRPGDKFQLTFPLRTNYMYAKVKKSLPEMYAFTVCMWLKSSATPGVGTPFSYAVPGQANELVLIEWGNNPMEILINDKVAKLPFVINDGKWHHICVTWTTRDGVWEAYQDGTQGGSGENLAPYHPIKPQGVLVLGQEQDTLGGGFDATQAFVGELAHFNIWDRKLTPGEVYNLATCSTKALSGNVIAWAESHIEIYGGATKWTFEACRQIN

SEQ ID NO: 378 - protein, 585 aa, Homo sapiens
MGSLKEELLKAIWHAFTALDQDHSGKVSKSQLKVLSHNLCTVLKVPHDPVALEEHFRDDDEGPVSNQGYMPYLNRFILEKVQDNFDKIEFNRMCWTLCVKKNLTKNPLLITEEDAFKIWVIFNFLSEDKYPLIIVSEEIEYLLKKLTEAMGGGWQQEQFEHYKINFDDSKNGLSAWELIELIGNGQFSKGMDRQTVSMAINEVFNELILDVLKQGYMMKKGHRRKNWTERWFVLKPNIISYYVSEDLKDKKGDILLDENCCVESLPDKDGKKCLFLVKCFDKTFEISASDKKKKQEWIQAIHSTIHLLKLGSPPPHKEARQRRKELRKKQLAEQEELERQMKELQAANESKQQELEAVRKKLEEAASRAAEEEKKRLQTQVELQARFSTELEREKLIRQQMEEQVAQKSSELEQYLQRVRELEDMYLKLQEALEDERQARQDEETVRKLQARLLEEESSKRAELEKWHLEQQQAIQTTEAEKQELENQRVLKEQALQEAMEQLEQLELERKQALEQYEEVKKKLEMATNKTKSWKDKVAHHEGLIRLIEPGSKNPHLITNWGPAAFTEAELEEREKNWKEKKTTE

SEQ ID NO: 379 - protein, 1164 aa, Homo sapiens
MPTMRRTVSEIRSRAEGYEKTDDVSEKTSLADQEEVRTIFINQPQLTKFCNNHVSTAKYNIITFLPRFLYSQFRRAANSFFLFIALLQQIPDVSPTGRYTTLVPLLFILAVAAIKEIIEDIKRHKADNAVNKKQTQVLRNGAWEIVHWEKVAVGEIVKVTNGEHLPADLISLSSSEPQAMCYIETSNLDGETNLKIRQGLPATSDIKDVDSLMRISGRIECESPNRHLYDFVGNIRLDGHGTVPLGADQILLRGAQLRNTQWVHGIVVYTGHDTKLMQNSTSPPLKLSNVERITNVQILILFCILIAMSLVCSVGSAIWNRRHSGKDWYLNLNYGGASNFGLNFLTFIILFNNLIPISLLVTLEVVKFTQAYFINWDLDMHYEPTDTAAMARTSNLNEELGQVKYIFSDKTGTLTCNVMQFKKCTIAGVAYGHVPEPEDYGCSPDEWQNSQFGDEKTFSDSSLLENLQNNHPTAPIICEFLTMMAVCHTAVPEREGDKIIYQAASPDEGALVRAAKQLNFVFTGRTPDSVIIDSLGQEERYELLNVLEFTSARKRMSVIVRTPSGKLRLYCKGADTVIYDRLAETSKYKEITLKHLEQFATEGLRTLCFAVAEISESDFQEWRAVYQRASTSVQNRLLKLEESYELIEKNLQLLGATAIEDKLQDQVPETIETLMKADIKIWILTGDKQETAINIGHSCKLLKKNMGMIVINEGSLDGTRETLSRHCTTLGDALRKENDFALIIDGKTLKYALTFGVRQYFLDLALSCKAVICCRVSPLQKSEVVEMVKKQVKVVTLAIGDGANDVSMIQTAHVGVGISGNEGLQAANSSDYSIAQFKYLKNLLMIHGAWNYNRVSKCILYCFYKNIVLYIIEIWFAFVNGFSGQILFERWCIGLYNVMFTAMPPLTLGIFERSCRKENMLKYPELYKTSQNALDFNTKVFWVHCLNGLFHSVILFWFPLKALQYGTAFGNGKTSDYLLLGNFVYTFVVITVCLKAGLETSYWTWFSHIAIWGSIALWVVFFGIYSSLWPAIPMAPDMSGEAAMLFSSGVFWMGLLFIPVASLLLDVVYKVIKRTAFKTLVDEVQELEAKSQDPGAVVLGKSLTERAQLLKNVFKKNHVNLYRSESLQQNLLHGYAFSQDENGIVSQSEVIRAYDTTKQRPDEW

SEQ ID NO: 380 - protein, 480 aa, Homo sapiens
MEVAPEQPRWMAHPAVLNAQHPDSHHPGLAHNYMEPAQLLPPDEVDVFFNHLDSQGNPYYANPAHARARVSYSPAHARLTGGQMCRPHLLHSPGLPWLDGGKAALSAAAAHHHNPWTVSPFSKTPLHPSAAGGPGGPLSVYPGAGGGSGGGSGSSVASLTPTAAHSGSHLFGFPPTPPKEVSPDPSTTGAASPASSSAGGSAARGEDKDGVKYQVSLTESMKMESGSPLRPGLATMGTQPATHHPIPTYPSYVPAAAHDYSSGLFHPGGFLGGPASSFTPKQRSKARSCSEGRECVNCGATATPLWRRDGTGHYLCNACGLYHKMNGQNRPLIKPKRRLSAARRAGTCCANCQTTTTTLWRRNANGDPVCNACGLYYKLHNVNRPLTMKKEGIQTRNRKMSNKSKKSKKGAECFEELSKCMQEKSSPFSAAALAGHMAPVGHLPPFSHSGHILPTPTPIHPSSSLSFGHPHPSSMVTAMG

SEQ ID NO: 381 - protein, 364 aa, Homo sapiens; identical to SEQ ID NO: 286
  ref <308>: DATABASE ACCESSION NUMBER: BC011679
  ref <309>: DATABASE ENTRY DATE: 2007-04-06
  ref <313>: RELEVANT RESIDUES IN SEQ ID NO: (1)..(364)

SEQ ID NO: 382 - DNA, 2063 bp, Homo sapiens
  ref <308>: DATABASE ACCESSION NUMBER: BC011679
  ref <309>: DATABASE ENTRY DATE: 2007-04-06
  ref <313>: RELEVANT RESIDUES IN SEQ ID NO: (1)..(2063)
ctcccctgtgctcccagcatgcctcgtggccggtgccgtcagcagggccctcgcattcccatctgggcagccgccaattatgccaacgcacatccatggcagcagatggacaaggcgtctcctggggtggcatacaccccccttgtggatccctggattgagcggccctgctgtggggacaccgtgtgtgtgcgaacgaccatggagcagaagagcacagctagtggcacttgtggcggtaaacctgcagaaaggggtcccctagctgggcacatgcccagctcccgaccccacagggtggacttctgctgggtaccaggctcagacccaggcacctttgatggctccccgtggctactggaccgcttcttggcccagctgggcgattacatgtccttccactttgagcactatcaggacaacatcagccgtgtctgcgagatcctcaggcgcctaacaggccgagcccaggcctgggcagccccctaccttgatggggacctgcccctgcctgacgattacgagctcttctgccaggatctcaaggaagttgttcaagacccgaacagttttgctgagtaccatgctgtggttacctgtcccctgcccctggcctccagccagctgccagtggcccctcagctgcctgtggtgaggcaatacttagctaggttcttagagggcctggcactcgacatgggtactgcccccaggtctttaccagccgccatggccacccctgctgtgtctgggtccaactctgtatctagaagtgctctgttcgagcagcagctgaccaaggagagcacccctgggcccaaggagcccccagtcctgcccagttctacatgtagctccaagcctggtcctgtggaaccagcctcttcccagccagaggaggcagcccccacacctgtccctagactgtcggagtcagctaatcctcctgcccagagaccagacccagctcatccaggaggtccaaaaccccagaaaacagaggaggaggttttggagacagagggagaccaggaggtgtccttaggtaccccacaggaggtggtggaggccccggagaccccaggagagccaccactttctcctgggttctgaacacagcccaggtgggaacaatgctgcccctcatgatgaagtggcctgtgtggcttgagcgccccatagtccccagtcagagcagagtggtgtccccagatgacttcagaccccatagctgggcaagatgcgcttgttttggactctgcgctgagcagaaccagctcccccaactccagcagagcttgacctccgccctgtgccctttccctgctgctggctctctgctgcatccctgcccgtcttctgggagtgccgtctcacccaggcctgctcccacgagggggtcgttttgtagatcaactctcagcagatagttgcatcatctttgtcacctccacccccataaaacaccccccttggtgtcttccacactggctgggactgaactgggtctgccacgtctgccctgttgggacctcgttcctgtatggggtttctgtgtctgtccccctagccccaccctctctgctccctgtgacttctgtcccagctggaatgtgaggaaggctgcctggaggaagtggccactttgattctgggggatgagtgggatagcatcttggcaaagaatgatgtttcctgtgggattaccagcagttctgggcagctggaaggtttggatgcaggaaggtgggatgcaagccccttgccaggctcagctgcaggcattcgccctttgtgtgttaacactgtagctctaatcgtgcctggtgttctgaagcaggctcctcttccctgctgctgtgctgccatcccctgctcactccgcactcgcatgcattgcggattcagcacttaagccctagtgtgtaaatgacttggatctccctcctggcagactgtgaccctcagcacaggggctctgtcttagtcagctctgtggcctggtacacaattggtgctcattaaacacgtgttggattactggcaaaaaaaaaaaaaaaaaa

SEQ ID NO: 383 - protein, 323 aa, Homo sapiens
  ref <308>: DATABASE ACCESSION NUMBER: FJ970024
  ref <309>: DATABASE ENTRY DATE: 2009-06-10
  ref <313>: RELEVANT RESIDUES IN SEQ ID NO: (1)..(323)
MARGPGLAPPPLRLPLLLLVLAAVTGHTAAQDNCTCPTNKMTVCSPDGPGGRCQCRALGSGMAVDCSTLTSKCLLLKARMSAPKNARTLVRPSEHALVDNDGLYDPDCDPEGRFKARQCNQTSVCWCVNSVGVRRTDKGDLSLRCDELVRTHHILIDLRHRPTAGAFNHSDLDAELRRLFRERYRLHPKFVAAVHYEQPTIQIELRQNTSQKAAGEVDIGDAAYYFERDIKGESLFQGRGGLDLRVRGEPLQVERTLIYYLDEIPPKFSMKRLTAGLIAVIVVVVVALVAGMAVLVITNRRKSGKYKKVEIKELGELRKEPSL

SEQ ID NO: 384 - DNA, 1586 bp, Homo sapiens
  misc_feature (7)..(7): n is a, c, g, or t
  ref <308>: DATABASE ACCESSION NUMBER: FJ970024
  ref <309>: DATABASE ENTRY DATE: 2009-06-10
  ref <313>: RELEVANT RESIDUES IN SEQ ID NO: (1)..(1586)
ctagagngaggggagggggcgggatgtgtcacccaaataccagtggggacggtcggtggtggaaccagccgggcaggtcgggtagagtataagagccggagggagcggccgggcggcagacgcctgcagaccatcccagacgccggagcccgagccccgacgagtccccgcgcctcatccgcccgcgtccggtccgcgttcctccgccccaccatggctcggggccccggcctcgcgccgccaccgctgcggctgccgctgctgctgctggtgctggcggcggtgaccggccacacggccgcgcaggacaactgcacgtgtcccaccaacaagatgaccgtgtgcagccccgacggccccggcggccgctgccagtgccgcgcgctgggctcgggcatggcggtcgactgctccacgctgacctccaagtgtctgctgctcaaggcgcgcatgagcgcccccaagaacgcccgcacgctggtgcggccgagtgagcacgcgctcgtggacaacgatggcctctacgaccccgactgcgaccccgagggccgcttcaaggcgcgccagtgcaaccagacgtcggtgtgctggtgcgtgaactcggtgggcgtgcgccgcacggacaagggcgacctgagcctacgctgcgatgagctggtgcgcacccaccacatcctcattgacctgcgccaccgccccaccgccggcgccttcaaccactcagacctggacgccgagctgaggcggctcttccgcgagcgctatcggctgcaccccaagttcgtggcggccgtgcactacgagcagcccaccatccagatcgagctgcggcagaacacgtctcaaaaggccgccggcgaggtggatatcggcgatgccgcctactacttcgagagggacatcaagggcgagtctctattccagggccgcggcggcctggacttgcgcgtgcgcggagaacccctgcaggtggagcgcacgctcatctattacctggacgagattcccccgaagttctccatgaagcgcctcaccgccggcctcatcgccgtcatcgtggtggtcgtggtggccctcgtcgccggcatggccgtcctggtgatcaccaaccggagaaagtcggggaagtacaagaaggtggagatcaaggaactgggggagttgagaaaggaaccgagcttgtaggtacccggcggggcaggggatggggtggggtaccggatttcggtatcgtcccagacccaagtgagtcacgcttcctgattcctcggcgcaaaggagacgtttatcctttcaaattcctgccttccccctcccttttgcgcacacaccaggtttaatagatcctggcctcagggtctcctttctttctcacttctgtcttgagggaagcatttctaaaatgtatcccctttcggtccaacaacaggaaacctgactggggcagtgaaggaagggatggcacagcgttatgtgtaaaaaacaagtatctgtatgacaacccgggatcgtttgcagtaactgatcattgctacttgttgaaggcttaaatgaagtttagtgcgcgcacgccactcacaacacat

SEQ ID NO: 385 - protein, 248 aa, Homo sapiens
  ref <308>: DATABASE ACCESSION NUMBER: AY371700
  ref <309>: DATABASE ENTRY DATE: 2004-06-01
  ref <313>: RELEVANT RESIDUES IN SEQ ID NO: (1)..(248)
MLAVHFDKPGGPENLYVKEVAKPSPGEGEVLLKVAASALNRADLMQRQGQYDPPPGASNILGLEASGHVAELGPGCQGHWKIGDTAMALLPGGGQAQYVTVPEGLLMPIPEGLTLTQAAAIPEAWLTAFQLLHLVGNVQAGDYVLIHAGLSGVGTAAIQLTRMAGAIPLVTAGSQKKLQMAEKLGAAAGFNYKKEDFSEATLKFTKVQANAGECFHGANSASLLHGGPPTSAAGSGQNLPSDRNPGGP

SEQ ID NO: 386 - DNA, 747 bp, Homo sapiens
  ref <308>: DATABASE ACCESSION NUMBER: AY371700
  ref <309>: DATABASE ENTRY DATE: 2004-06-01
  ref <313>: RELEVANT RESIDUES IN SEQ ID NO: (1)..(747)
atgttagccgtgcactttgacaagccgggaggaccggaaaacctctacgtgaaggaggtggccaagccgagcccgggggagggtgaagtcctcctgaaggtggcggccagcgccctgaaccgggcggacttaatgcagagacaaggccagtatgacccacctccaggagccagcaacattttgggacttgaggcatctggacatgtggcagagctggggcctggctgccagggacactggaagatcggggacacagccatggctctgctccccggtgggggccaggctcagtacgtcactgtccccgaagggctcctcatgcctatcccagagggattgaccctgacccaggctgcagccatcccagaggcctggctcaccgccttccagctgttacatcttgtgggaaatgttcaggctggagactatgtgctaatccatgcaggactgagtggtgtgggcacagctgctatccaactcacccggatggctggagctattcctctggtcacagctggctcccagaagaagcttcaaatggcagaaaagcttggagcagctgctggattcaattacaaaaaagaggatttctctgaagcaacgctgaaattcaccaaagtacaagcaaatgctggtgaatgctttcacggagcaaattctgcctcacttctccacggagggcccccaacgtctgctgccggttctggacagaatctacccagtgaccgaaatccaggaggcccataa

SEQ ID NO: 387 - protein, 332 aa, Homo sapiens
  ref <308>: DATABASE ACCESSION NUMBER: DQ232851
  ref <309>: DATABASE ENTRY DATE: 2005-10-22
  ref <313>: RELEVANT RESIDUES IN SEQ ID NO: (1)..(332)
MLAVHFDKPGGPENLYVKEVAKPSPGEGEVLLKVAASALNRADLMQRQGQYDPPPGASNILGLEASGHVAELGPGCQGHWKIGDTAMALLPGGGQAQYVTVPEGLLMPIPEGLTLTQAAAIPEAWLTAFQLLHLVGNVQAGDYVLIHAGLSGVGTAAIQLTRMAGAIPLVTAGSQKKLQMAEKLGAAAGFNYKKEDFSEATLKFTKGAGVNLILDCIGGSYWEKNVNCLALDGRWVLYGLMGGGDINGPLFSKLLFKRGSLITSLLRSRDNKYKQMLVNAFTEQILPHFSTEGPQRLLPVLDRIYPVTEIQEAHKYMEANKNIGKIVLELPQ

SEQ ID NO: 388 - DNA, 11265 bp, Homo sapiens
  ref <308>: DATABASE ACCESSION NUMBER: DQ232851
  ref <309>: DATABASE ENTRY DATE: 2005-10-22
  ref <313>: RELEVANT RESIDUES IN SEQ ID NO: (1)..(11265)
tgttttttgccctaacaagtgaattatatcttaatggggtatattgagttacagtgcttttcttctagtcaatagacgctagtctactctcttctagcttccagattgcagatagaaacttgctgggcacagtggctcatacttgtaatcctagcactttgggaggctgaggcaggaggattgcttgagtccaggagtttgagaccagcctgggcaacataatgagacccctacactacaaaaaagagagagagagaaagagggggtggggaaggagggaaggaaggaaggagggagggagggagagaaggaagccattttttttaaccaattgtgagtaacttattctttccacacttgttagaacctgaaattttataaaatataggcatgcatttttgttcttatgaatccatcctttagtgaatgttttcaatccgtataatctggtagaatttaggaaaactgtattcttttatttggttaactattgaatcttcttcatccattcctcttcctccttctaaaattccttttttttttttttttttgagacggagtctcactctgtcgtccaggctggagtgcagtggtgcgatctcggctcactgcaagctccccctcccgggttcacgccattctcctgcctcagcctcccgaatagctgggactacaggcgcccgccaccacgcccggctaattttttgtatttttagtagagacggggtttcaccgtgttagccaggatggtctcgatctcctgacctcgtgatccgcccgccttggcctcccaaagttctgggattacaggcgtgagccaccgcgcccggcctaaaattcctgttattctcatagcagggtctcctgaatttttccttaagtcccatcattttattatttccatctctataggcttttgctctgttgtgttaaagaaataattattcaatgatacttgttaaagcacattaaggaagactttatttagcaccatcgctacaggtttagggaccactgcaatgagttcttgcagtggaggagacaggttgggatcaactctgaatgcatcacggacaagtgggaatgtatagccaaggagcagtgtagggggtcagtggatggaaaattggtaagaggcatcaggggtaagggggattctatctaaactgacctaacaggattctcactgaagacaggccagggtggtcggatatcacttgggggatggtggaggatgagatattgagggtgatcagatgtcaaggatgggaggttcttactaaaacaggaatttacaaggagtgctacggatatgtagtggggggaggccagggatgctgctaaacatcctacgatgcacaggacgatctcctacaataacgaactagctagtccaaaatgtcaatagcgccgagattgagaaaccttcatgtagcttacggatacagcttttacccaatcgccagcatccttctcctggggctgaacctctcccccaggactgtcaggaggaggcgagtgataaggatcccaggactgcgttttgccttccttccccacccccactcccaacggctcctttctcttctcttagcagcacccagcttgcccacccatgctcaagatgggcgggatgccagcctgttacataaatgtgccaaaagcctggccatgcctggaaaatggaccaatccgcccgccaagaggttgggtctcgttccctagagagaaggaagtttcctctccttgaagtgagagctagaatcgcactttctgtcaagctgagagaaagactcttttccagaggctaaaaggacaagaaaatctgatttgcttgcttctaactttgcgttttaaagggggaaggaggaaaggaaagagggggagggtggttctgcttagccccacccctccggctaccccaggtccagccgtccattccggtggaggcagaggcagtcctggggctctggggctcgggctttgtcaccgggacccgcaggagccagaaccactcggcgccgcctggtgcatgggaggggagccgggccaggagtaagtaactcatacgggcgccggggacccgggtcgggctgggggcttccaactcagagggagtgtgatttgcctgatcctcttcggcgttgtcctgctctgccgcatccagccctgtaccgccatcccacttcccgccgttcccatctgtgttccgggtgggatcggtctggaggcggccgaggacttcccaggcaggagctcggggcggaggccgggtccgcggcagaccagggcagcgaggcgctggccggcagggggcgctgcggtgccagcctgaggctgggctgctccgcgaggatacagcggcccctgccctgtcctgtcctgccctgccctgccctgtcctgtcctgccctgccctgccctgtcctgtcctgccctgccctgccctgtgtcctcagacaatatgttagccgtgcactttgacaagccgggaggaccggaaaacctctacgtgaaggaggtggccaagccgagcccgggggagggtgaagtcctcctgaaggtggcggccagcgccctgaaccgggcggacttaatgcaggtacccagggctcagccgcgccggggcgggcgggactccagagcctccctctcaacagcactcagtggacattgaccagacgtgaaggcgtgcaccgctccacacccagcaggcagctgcgctggggcttcccagacctaaacccagggcgccctctttgttcatgcaaaacaagggggagtacttgtaaagcagaatccaccccgagctaatccatagccactcaggcctccagatgagggcggaactaacattgttgtggggtgtgggcacacttactccccaggctaccctgttcgccatcttaattctacagataaggaaactgaagttcagtgaggttaagcagtacgcccaaggccgtgacactagcaatcagaagagctgggattcaagctgaggtctttgtggctccaaagacctcttaactctttccactctgagagtcccggagctgacagcgggcagtactcttaagaattttcttctgtctgatgctgatttactgacctgggccagctgcattggttggggtcattcagaaatgtgcatcagaatcccccggggcacaaaagaaacgtgatgggggcccaggcacgtgtactttgaaatactcctcaggtggttctgccacacactcctggttaagtccctctgctctacagcttctgaggactggggtgagtgagcacagagcctagcgcttgatgcatgggaaccatcgtcaaggttcctaatcccactactattatttcccgtctgggactcagtttctccatctgtaaagcaaggggttcagatgaggtaaatagctaaggactctaccagttataacatccactgatcatgtgacctccagtttatttgcataaaactaatggcctctcctttttcttctccttacttacaaaaacctgacttcattctgaaatttatttttgaaaaaaaaaagaggggatcttggaaggggggccaggggtagtgacatacagatttctgatcatgctcaccacttagtgcacttctttctctgcagagacaaggccagtatgacccacctccaggagccagcaacattttgggacttgaggcatctggacatgtggcagagctggggcctggctgccagggacactggaagatcggggacacagccatggctctgctccccggtgggggccaggctcagtacgtcactgtccccgaagggctcctcatgcctatcccagagggattgaccctgacccaggctgcagccatcccagaggcctggctcaccgccttccagctgttacatcttgtgggtgaggaggcctccatgctcactccacacaatgtggctcaacaccttcataaatcagccaacttgaatcccagcaatcccccagggcactcccaggccttcctgtatcacctgtattgtcaggtcctcaaaccatgttagaagggtttaatgttgaggctgagaatcatggttagcagatagagggtctggataacactagataggaggcctatgtacatgttaacaccggacgcccagcagaagtcccagcttcttagaatcatactgagcttctctctggggtcccagtgcaacagaagggaccaattgactcatttattcctcctcaatcccacagaggccagtcaagaactcacataagggaatctaagaagacttggtccttgcctttagacagtgcagtgtaactgagaaggcaacatatgcataagatcagatgaccatagagtttagaaggatagccctgtctatgatagaagctggagatgagtaaagatggtgtggacaagggtagtcagaaggctttttggaaggctttgaagggtgggtagacttgtgaaggacataaggcatgccaaggtggcctaagaaagagtatcagccaggcaaggtggctcacacctataatcgtagcactttggaagacagatcacgagcccaggagttcaagatcagcctgggcaacatggcgaaaccctgtttctacaaaaaatacaaaaattaaccaggcatgatggtgcatgcctgttgtctcagttactcaggaggctgagttgggaggatcacctgagcccaggaaggtcaaggctgcagtgagccatgatcatgccactgcactccagcctgggcagtagagtgagactctgtctcaaagaaaaagaaagagtaggctgggcgtggtggctcacgcctgtaatcccagcactttgggcggctgaggtgggtggatcatgaggtcaggagatcgagaccatcctggctaacacggtgaaacttcatctctactaaaaatacaaaaaattagctgggcgtggtggtgggcacctgtagtcccagctactcaggaagctgaggcaagagaatggcatgaacgcagggggggtggggcagagcttgcagtgagccaagattgcgccactgcactccagcctgggtgacagagtgagactccgtctcaaaaaaaaaaaaaaaacagtatcaaggtgagaccagccactgcactcagtagtgaaggatgactattgtgatttgtgaaaaatgaggctggagccagatcatggtgtccttgaatatcaagctgtctggactcaatgcaaaagccaatggagaagcactttacattttgaggaggaagtaacataatgcaagtgccatcttaggaagaggagcctggtggctgtgtgttgcctggatcaggaagaccagctggaggccagtttcagactctagaaggactggctttcggtggtgaccatgggaatggtagttgttcttacttattcaggtgtaggtcagagatgtgcattttggtgttataggtaaaatagagattatggatgtggctgcttatagccctgtttcaaaaggctgttttccactttagccagaggcaataagacagaaaaggtcgtcaatatgctctttttctttctccaaagaacaagatggtttgtatttgagtcacagcgtcccacccccaccagcccacccccaccccaccaaataaaaaaggaaaagcaaaagattgatttggcatttggtgcaacggccaggtgatcttgatagaatatgcctgtgtggggaatgtgtagcagttgcaaagtaaagagaaccctgtactttctgtcacaggaaatgttcaggctggagactatgtgctaatccatgcaggactgagtggtgtgggcacagctgctatccaactcacccggatggctggagctattcctctggtcacagctggctcccagaagaagcttcaaatggcagaaaagcttggagcagctgctggattcaattacaaaaaagaggatttctctgaagcaacgctgaaattcaccaaaggtaaacaactgcttctacagttcagcaggaatttaagagatgattaaataaaagccccaccagtctcaaagttgccagtgctgtgtatcagtcttacctctgctaagtgcacaacagctgccctggccaaattctagtactatggtatttgaccactggagacaggcagtcatatttaaatctaagatggtttccatgtgcattcttgcaagagataagattcatccacactttagaccatgcagacttggtctggaattatccagcaccttttcttcccaaccagccattccacacttagttaacaggaggcttggaggcagagaccagtttggagccagccatggtagggttgggtggtagcaccctaaatgagttaagtagatgtgcacacctctgtattccaaagccagacgtgtctatttttggctcatccctttccgtttctctttcttttttttttttgagatggagtctcactctgtcactgaggatggcgtgcagtggcttgatctcggctcgctgcaacctccgcctcccaggttcaagtgattctccagccttagcctcctgagtagctgagatcacaggcgcaccaccacgcccagctaatttttgtatttttagtagagacgggctttcactatgttggccaggctggtctcgaactcctgacctcaggtgatccacctgcctcagcctcccaaagtactgggattacaggcatgagccaccatgcctggcctccattttttatgtgagtagaaaaggagagatgaaaccaaagctagaaagcctatgattccaataacctagtgcggacacttcctaacttctatgtgaacaactagcctaggttgggcctcctgtattctgttctcaatcgtgcctgggtgtcagtgggactgtacttattttggcatgacaggagacgctaggtcatggtgccccatttccctcttgctgtagctaggcctcataaatggtgaacttcatacatgctatcatagagttctgctatctaaactccatttacaacagttcttcaagcagtgtttctaattccaacctatagatttaccacttgcatctgtatttatatccataatccccaaatataccatggtatcttatttagcaccaagctgactagcatcacaaatctgtttcctatggaaggtgctggagttaatcttattctagactgcataggcggatcctactgggagaagaacgtcaactgcctggctcttgatggtcgatgggttctctatggtctgatgggaggaggtgacatcaatgggcccctgttttcaaagctactttttaagcgaggaagtctgatcaccagtttgctgaggtctagggacaataaggtgagtgatgaatgaaaagaaaacatgtgatttaacccagaaaagtgtggttcatttacattaccccgagaaaggaagctctaccttagattacggaggttagtttctatgaagaaacctccccctctgaagataaagagggaacccgatttcagagaactgattcagattggttgatagaagcttcagtatcatgaaaagaagtgtagctgatacttcacaggttatctgaacattctaacagaatgaagaaagcactgactatattaggaagtatttcgagtagttccaagactttgttttcaaaggcagaattcatctcagtgtgctagaaagtctcttaggtgagtaaaaaaataagtaagccttggccttcaacagattataggttccatgccgggcacagtggcacttgcttgtagtcccagctacttggaaggctgaggcagaggattgcttgagtccaggagtttcaaggctgcagtgagctatgattgcacctgtgcatagccactgtaccccagcctgagcaacatagcaaaacctcatctcaaaaaaaaaaagattatatgctcctgaaatattccatctggcagtctagcaggtaccacctttgggaatgtttccaccatagggttttgcaccagctgagggacaggagagcttaagcatccttttttcactaagcctatatgagtcctatctgtggctgcctcctgggtaaagacactttatttaaaaacaattcttaggctgtcagtgacactaacattttactccaggcttcagtctttatctggtacagaacagaagttacacatttggaggtacaagggagccagagatcacctgtaacccccctttagctcctatgtggtctcttcagctggctctagaaaccaaattgataccagcagattgacaggagaaaagcatgtactttttttttttttttttttttttatggagacagggtcttactctgtcacccaggctggagtgcaatggcacaatcagcctcctgggtagctaagactgaaggcataccaccatgcctggcttgtattttttatagagacaggttttcaccatgttgcccaggctgatctcaaactcccaggctcaagtgattcggccaaagtaagatgcttttgtaatttttagacaaagaacaataaatttgagaagaaataagacaaaatctggctagggatagtaaatttctagggaagtcactaggagatatatgggggtggggggtgtaaaactagtggaagataagggttacttccttaagtgtatttattcagttccattgcagccccgtttccagtctctggtgataagggctttttgccctagtatggggagggtacccctctcagaggaatctttatgacttgctacatgcaagaagagacaggtcagctagccttttctgaaactacaatttctccaatgctttcacctcaaaattaacaatatacctatcggacatattctgagatggcacatgactccttcaagggtatttcacacacatgctaggaagtgaggggttaagtgtccctgtgtgctttttcagatacgtggcttcagagagagcaagaaggctgaggaggatgaggagggcagggtgaggctctctccccaggctgatgatctcctttcccttgtcttagtacaagcaaatgctggtgaatgctttcacggagcaaattctgcctcacttctccacggagggcccccaacgtctgctgccggttctggacagaatctacccagtgaccgaaatccaggaggcccataagtacatggaggccaacaagaacataggcaagatcgtcctggaactgccccagtgaaggaggatggggcaggacaggacgcggccaccccaggcctttccagagcaaacctggagaagattcacaatagacaggccaagaaacccggtgcttcctccagagccgtttaaagctgatatgaggaaataaagagtgaactggaagggtggcacgcggactggggccgccgcggcggggttgaggtgggagtccggacgggcgtcgcagcggggattactgaggcccgatcagctgacgctcaacctgagggcccctccagggacggagattctgggtatagttacagcgtcagccgtgacacaagccgccagaaccccacatattccgccttgcgcacagctagaggcccaggcccaccacctccggcacctgcccgcgcgccccgcaaccagtgggcaccacagcaggccccagccctgcccgctactcacctgggccccaccccacctctcgccgccctcctcaggccccaccacctcccgctacacatctgagccccgccccacctccaccactttcctcagccccaaccacctcctgctacacttctgggccccgccgcacctccaccaccctcctcaggccccgatcccttccgctactcacctgggtcccgccccagctcagtcctcctcaggccccgccttcgcccgctactcacctgggccccaccccacctctcgccaccctcctcaggccccaccacctcccgctacacatctgggccccgccccaccgccaccaccctcctcaggccccgccccttcccattactcacttgggtcccgccccagctcaccgccttgctcaggcccggctccctcccggatactcacttgggccccaccccagctctccgcaccctcctcaggccccgccccctcccgctactcacctgggtcccgccctacctgtcataaccctgctcaagccccgcctcctccgctccccagttactcacctgagacccgccccagctctccgccctcctcaggccccgccctctccacccgggttcctctgctcagggcctccccgaccggaacatctcgccttttggaggctacgccccgccctttacggtacagagcccggaagtgtcttggactctcgcctttccatcttccggcctcgagtctcgctcaggctcggttttaccccggagtctattcgaagggggctgctacgtcagcgcgtctcagcgtaagacggcgctattccgctgtaacagcttccggcgggtcctggatgttgatgtcctgcatctaacgcggtgtaacccccgaagccgagcgagctccggaggaatttcagtatctgctacggtaacttcatcagcccgccaagatggcgatgcaagcggccaagagggcgaacgtgagtatcgggtgttctgcggagggtgggagaacttcgggtttgactttcttagcggcgtggatcggagcattcttgctcctcctccgtccccagagcggagaactccagaattcctatcctgtcagcgaagacactatccggccccatcctcagagatatgctccttgagccacatttctgtccccaccccttttgagagttcctcagtctctaccctagtgtcagtgatagtgttacccctatagcctctttgcttgacccgcacctaaggacctggcgttaggattatctccttgacttaaagtcgatatctcagaagagtcctcaactaacttaatggttcaccaacaactaggacctgggattcccctcagatcatggtgcttttcggatccttcattaacacattaattaaaacaatattttttgagcacctactatgtattctgcttgccatgtgggacataattcatcaattatatttattgaatagctactatgtgccagacactagtcttacgtattgggaatacagcagtgaataaaacaagtccttctgcttacattctagtgtttgagagtacagtgttacggaaacttttaaaaaaaaaaaactcaaaaaagagattagtcaacagtaaaacgcttagaggtgtaagatgaagttag

SEQ ID NO: 389 - protein, 243 aa, Homo sapiens
MTHLQEPATFWDLRHLDMWQSWGLAARDTGRSGTQPWLCSPVGARLRNVQAGDYVLIHAGLSGVGTAAIQLTRMAGAIPLVTAGSQKKLQMAEKLGAAAGFNYKKEDFSEATLKFTKGAGVNLILDCIGGSYWEKNVNCLALDGRWVLYGLMGGGDINGPLFSKLLFKRGSLITSLLRSRDNKYKQMLVNAFTEQILPHFSTEGPQRLLPVLDRIYPVTEIQEAHKYMEANKNIGKIVLELPQ

SEQ ID NO: 390 - DNA, 1726 bp, Homo sapiens
actcggcgccgcctggtgcatgggaggggagccgggccaggagtaagtaactcatacgggcgccggggacccgggtcgggctgggggcttccaactcagagggagtgtgatttgcctgatcctcttcggcgttgtcctgctctgccgcatccagccctgtaccgccatcccacttcccgccgttcccatctgtgttccgggtgggatcggtctggaggcggccgaggacttcccaggcaggagctcggggcggaggccgggtccgcggcagaccagggcagcgaggcgctggccggcagggggcgctgcggtgccagcctgaggctgggctgctccgcgaggatacagcggcccctgccctgtcctgtcctgccctgccctgtcctgtcctgccctgccctgccctgtcctgtcctgccctgccctgccctgtgtcctcagacaatatgttagccgtgcactttgacaagccgggaggaccggaaaacctctacgtgaaggaggtggccaagccgagcccgggggagggtgaagtcctcctgaaggcggcggccagcgccctgaaccgggcggacttaatgcagagacaaggccagtatgacccacctccaggagccagcaacattttgggacttgaggcatctggacatgtggcagagctggggcctggctgccagggacactggaagatcggggacacagccatggctctgctccccggtgggggccaggctcagaaatgttcaggctggagactatgtgctaatccatgcaggactgagtggtgtgggcacagctgctatccaactcacccggatggctggagctattcctctggtcacagctggctcccagaagaagcttcaaatggcagaaaagcttggagcagctgctggattcaattacaaaaaagaggatttctctgaagcaacgctgaaattcaccaaaggtgctggagttaatcttattctagactgcataggcggatcctactgggagaagaacgtcaactgcctggctcttgatggtcgatgggttctctatggtctgatggggggaggtgacatcaatgggcccctgttttcaaagctactttttaagcgaggaagtctgatcaccagtttgctgaggtctagggacaataagtacaagcaaatgctggtgaatgctttcacggagcaaattctgcctcacttctccacggagggcccccaacgtctgctgccggttctggacagaatctacccagtgaccgaaatccaggaggcccataagtacatggaggccaacaagaacataggcaagatcgtcctggaactgccccagtgaaggaggatggggcaggacaggacgcggccaccccaggcctttccagagcaaacctggagaagattcacaatagacaggccaagaaacccggtgcttcctccagagccgtttaaagctgatatgaggaaataaagagtgaactggaagggtggcacgcggactggggccgccgcggcggggttgaggtgggagtccggacgggcgtcgcagcggggattactgaggcccgatcagctgacgctcaacctgagggcccctccagggacggagattctgggtatagttacagcgtcagccgtgacacaagccgccagaaccccacatattccgccttgcgcacagctagaggcccaggcccaccacctccggcacctgcccgcgcgccccgcaaccagtg

What is claimed:

1. A method of evaluating the competence of a mammalian oocyte for implantation or fertilization comprising:
(i) obtaining a nucleic acid or polypeptide sample;
(ii) determining the level of marker expression of at least one gene or corresponding polypeptide encoded thereby selected from the group of TP53I3 or SPSB2 in said sample; and
(iii) comparing the level of marker expression TP53I3 or SPSB2 in the sample with a control or reference standard,
wherein detecting differential marker expression between the sample and the control is indicative of the competence of an oocyte for implantation.

2. The method of claim 1 wherein said TP53I3 gene is a human or non-human primate gene or polypeptide.

3. The method of claim 1 or 2, wherein said TP53I3 gene has the nucleic acid sequence of SEQ ID NO: 385, 387, or 389, or comprises the amino acid sequence of SEQ ID NO: 386, 388, or 390.

4. The method of claim 1 wherein said SPSB2 gene is a human or non-human primate gene or polypeptide.

5. The method of claim 1 or 4, wherein SPSB2 has the nucleic acid sequence of SEQ ID NO: 252 or comprises the amino acid sequence of SEQ ID NO: 351.

6. The method of any one of claims 1-5, wherein the sample is derived from an oocyte or cumulus cell.

7. The method of any one of claims 1-6, wherein the control or reference standard is derived from one of the group consisting of: an oocyte competent for implantation, a chromosomally normal oocyte, an oocyte not competent for implantation, and a chromosomally abnormal oocyte.

8. The method of any one of claims 1-6, wherein the sample is derived from follicular fluid.

9. The method of any one of claims 1-6, wherein the sample is derived from one or more cumulus cells of an oocyte potentially to be used for IVF implantation.

10. The method of any one of claims 1-6, wherein the control or reference standard is derived from one of the group consisting of: follicular fluid associated with an oocyte competent for implantation, follicular fluid associated with a chromosomally normal oocyte, follicular fluid associated with an oocyte not competent for implantation and follicular fluid associated with a chromosomally abnormal oocyte.

11. The method of any one of claims 1-6, wherein the sample is derived from culture medium.

12. The method of any one of claims 1-6, wherein the control or reference standard is derived from one of the group consisting of: culture medium associated with an oocyte competent for implantation, culture medium associated with a chromosomally normal oocyte, culture medium associated with an oocyte not competent for implantation, and culture medium associated with a chromosomally abnormal oocyte and the assay detects the level of expression of both TP53I3 and SPSB2.

13. The method of any one of claims 1-12, wherein the level of marker expression determined in the sample is at least 20% different from the level of marker expression determined in the control or reference standard.

14. The method of any one of claims 1-13 wherein the level of marker expression is detected by at least one of the group consisting of nucleic acid microarray, Northern blot, and reverse transcription PCR.

15. The method of any one of claims 1-14, wherein the level of marker expression is detected by at least one of the group consisting of Western blot, enzyme-linked immunosorbent assay, protein microarray and FACS analysis.

16. The method of any one of claims 1-15, wherein the mammalian oocyte is of a domesticated mammal.

17. The method of claim 1, wherein the mammalian oocyte is of a human.

18. The method of any one of claims 1-17 that further includes detecting at least one other nucleic acid or polypeptide encoded thereby selected from the group consisting of SEQ ID NO:1-390 and the corresponding encoded polypeptide or any combination thereof.

19. The method of claim 18, that further includes: (i) determining in a sample the level. of marker expression of at least one nucleic acid or corresponding polypeptide encoded thereby selected from the nucleic acids exemplified by SEQ ID NOS: 184, 187, 189, 191, and 230, and (ii) comparing the level of marker expression in the sample with a control or reference standard, wherein detecting differential marker expression of said nucleic acids or polypeptides indicative of the competence of an oocyte for implantation.

20. The method of claim 18 or 19, wherein the sample is derived from a cumulus cell.

21. The method of claim 18 or 19, wherein the control or reference standard is derived from one of the group consisting of a cumulus cell associated with an oocyte competent for implantation, a cumulus cell associated with a chromosomally normal oocyte, a cumulus cell associated with an oocyte not competent for implantation and a cumulus cell associated with a chromosomally abnormal oocyte, or the sample is derived from follicular fluid.

22. The method of claim 18 or 19, wherein the control or reference standard is derived from one of the group consisting of: culture medium associated with a cumulus cell associated with an oocyte competent for implantation, culture medium associated with a cumulus cell associated with a chromosomally normal oocyte, culture medium associated with a cumulus cell associated with an oocyte not competent for implantation, and culture medium associated with a cumulus cell associated with a chromosomally abnormal oocyte.

23. The method of any one of claims 1-22 wherein the mammalian oocyte is of a domesticated mammal or is human oocyte.

24. The method of claim 23, wherein the mammalian oocyte is a human oocyte.

25. The method of any one of claims 1-24, wherein the method further includes
(i) determining in a sample the level of marker expression of at least one nucleic acid selected from the group of nucleic acids exemplified by SEQ ID NOS: 19, 25, 33, 38, and 43 and (ii) comparing the level of marker expression in the sample with a control or reference standard, wherein detecting differential marker expression between the sample and the control is indicative of the competence of the oocyte for implantation or fertilization.

26. The method of any one of claims 1-25, that further includes determining the level of marker expression of at least one nucleic acid that encodes an amino acid sequence selected from the group of amino acids consisting of SEQ ID NOS: 183-282 in said sample; and comparing the level of marker expression in the sample with a control or reference standard, wherein detecting differential marker expression between the sample and the control is indicative of the competence of the oocyte for fertilization.

27. The method of any one of claims 1-26, that further includes evaluating the competence of a mammalian oocyte for fertilization by in addition determining the level of marker expression of at least one amino acid selected from the group of amino acids consisting of SEQ ID NOS: 283-390 in said sample; and
comparing the level of marker expression in the sample with a control or reference standard, wherein detecting differential marker expression between the sample and the control is indicative of the competence of the oocyte for fertilization.

28. The method of any one of claims 1-27, wherein the level of marker expression is detected by nucleic acid microarray, real time PCR, Northern blot, or reverse transcription PCR.

29. The method of any one of claims 1-27, wherein the level of marker expression is detected by Western blot, immunoassay (e.g., enzyme-linked immunosorbent assay), protein microarray, or FACS analysis.

30. The method off any one of claims 1-29, that in addition includes determining the level of marker expression of at least one gene selected from the group consisting of B3GALNT2, C22orf29, CCL16, DCBLD1, DCC1, DHX9, OTUD5, RBBP6, SEPT11, SLC25A36, and TACSTD2, Unassigned (helicase) in said sample; and
comparing the level of marker expression in the sample with a control or reference standard, wherein detecting differential marker expression between the sample and the control is further indicative of the competence of the oocyte for implantation or fertilization.

31. The method of any one of claims 1-30, wherein the sample is derived from a cumulus cell, an oocyte, polar body, is a nucleic acid sample or is an amino acid sample.

32. The method of any one of claims 1-31, wherein the control or reference standard is derived from one of the group consisting of a cumulus cell associated with an oocyte competent for implantation, a cumulus cell associated with a chromosomally normal oocyte, a cumulus cell associated with an oocyte not competent for implantation and a cumulus cell associated with a chromosomally abnormal oocyte.

33. The method of any one of claims 1-32, wherein the sample is derived from follicular fluid.

34. The method of claim 33, wherein the control or reference standard is derived from one of the group consisting of follicular fluid associated with a cumulus cell associated with an oocyte competent for implantation, follicular fluid associated with a cumulus cell associated with a chromosomally normal oocyte, follicular fluid associated with a cumulus cell associated with an oocyte not competent for implantation and follicular fluid associated with a cumulus cell associated with a chromosomally abnormal oocyte.

35. The method of any one of claims 1-34, wherein the sample is derived from culture medium.

36. The method of claim 35, wherein the control or reference standard is derived from one of the 36. group consisting of culture medium associated with a cumulus cell associated with an oocyte competent for implantation, culture medium associated with a cumulus cell associated with a chromosomally normal oocyte, culture medium associated with a cumulus cell associated with an oocyte not competent for implantation, and culture medium associated with a cumulus cell associated with a chromosomally abnormal oocyte.

37. The method of any one of claims 1-36, wherein the level of marker expression is detected by nucleic acid microarray, cytogenetic analysis (aCGH), real-time PCR, TLDA, Northern blot, or reverse transcription PCR and/or by Western blot, immunoassay (e.g., enzyme-linked immunosorbent assay), protein microarray, or FACS analysis.

38. The method of any one of claims 1-37, which further includes detecting B3GALNT2 the nucleic acid sequence of SEQ ID NO: 185 or the amino acid sequence of SEQ ID NO: 285.

39. The method of any one of claims 1-37, which further includes detecting the C22orf29 nucleic acid sequence of SEQ ID NO: 381 or the amino acid sequence of SEQ ID NO: 382.

40. The method of any one of claims 1-37, which further includes detecting the CCL16 nucleic acid sequence of SEQ ID NO: 187 or the amino acid sequence of SEQ ID NO: 287.

41. The method of any one of claims 1-37, which further includes detecting the DCBLD1 is nucleic acid sequence of SEQ ID NO: 191 or the amino acid sequence of SEQ ID NO: 291.

42. The method of any one of claims 1-37, which further includes detecting the DHX9 nucleic acid sequence of SEQ ID NO: 188 or the amino acid sequence of SEQ ID NO: 288.

43. The method of any one of claims 1-37, which further includes detecting the OTUD5 nucleic acid sequence of SEQ ID NO: 193 or the amino acid sequence of SEQ ID NO: 293.

44. The method of any one of claims 1-37, which further includes detecting the RBBP6 nucleic acid sequence of SEQ ID NO: 184 or the amino acid sequence of SEQ ID NO: 284.

45. The method of any one of claims 1-37, which further includes detecting the SEPT11 nucleic acid sequence of SEQ ID NO: 192 or the amino acid sequence of SEQ ID NO: 292.

46. The method of any one of claims 1-37, which further includes detecting the SLC25A36 nucleic acid sequence of SEQ ID NO: 190 or the amino acid sequence of SEQ ID NO: 290.

47. The method of any one of claims 1-37, which further includes detecting the TACSTD2 nucleic acid sequence of SEQ ID NO: 383 or the amino acid sequence of SEQ ID NO: 384.

48. An array comprising at least SPSB2 and TP53I3 genes or SPSB2 and TP53I3 nucleic acids, primers, polypeptides or antibodies which specifically detect, amplify, or bind to SPSB2 and TP53I3 nucleic acids or polypeptides.

49. The array of claim 48, that comprises primers which amplify SPSB2 and TP53I3 nucleic acids.

50. The array of claim 48, that comprises antibodies or nucleic acids which specifically bind SPSB2 and TP53I3 polypeptides.

51. The array of any of claims 48-50 that comprises nucleic acids or polypeptides that are at least 90% identical to the TP53I3 nucleic acid sequence of SEQ ID NO: 385, 387, or 389, or the amino acid sequence of SEQ ID NO: 386, 388, or 390 and/or to the SPSB2 nucleic acid sequence of SEQ ID NO: 252 and/or the amino acid sequence of SEQ ID NO: 351.

52. The array of claim 51, that comprises nucleic acids or polypeptides that are at least 95% identical to the TP53I3 nucleic acid sequence of SEQ ID NO: 385, 387, or 389, or the amino acid sequence of SEQ ID NO: 386, 388, or 390 or to the SPSB2 nucleic acid sequence of SEQ ID NO: 252 or the amino acid sequence of SEQ ID NO: 351.

53. The array of any of claim 52 that comprises nucleic acids or polypeptides that are identical to the TP53I3 nucleic acid sequence of SEQ ID NO: 385, 387, or 389, or the amino acid sequence of SEQ ID NO: 386, 388, or 390, and identical to the SPSB2 nucleic acid sequence of SEQ ID NO: 252 and/or the amino acid sequence of SEQ ID NO: 351.

54. The array of claim 48 that comprises nucleic acid primers that amplify the TP53I3 nucleic acid sequence of SEQ ID NO: 385, 387, or 389 and/or the SPSB2 nucleic acid sequence of SEQ ID NO: 252.

55. The array of any one of claims 48-54 wherein said SPSB2 gene and said TP53I3 gene are human or non-human primate genes and said nucleic acid, primer, polypeptide or antibody is a human or non-human primate gene, or a nucleic acid, primer, polypeptide or an antibody that specifically amplifies or specifically binds to said human or non-human primate gene, nucleic acid or polypeptide.

56. The array of any of claims 48-55, that comprises one or more detectable labels which may be attached to said gene, nucleic acids, polypeptides, primers or antibodies.

57. The array of claim 56, wherein SPSB2 is encoded by the nucleic acid sequence of SEQ ID NO: 252 or comprises the amino acid sequence of SEQ ID NO: 351.

58. The array of any one of claims 48-57, further comprising at least one gene, primer polypeptide or antibody that encodes, amplifies, or binds a gene selected from the group consisting of B3GALNT2, C22orf29, CCL16, DCBLD1, DCC1, DHX9, OTUD5, RBBP6, SEPT11, SLC25A36, and TACSTD2, Unassigned (helicase) or a polypeptide encoded thereby.

59. The array of claim 58, further comprising at least two, three, four, five, six, seven, eight, nine or ten or all eleven of said genes or polypeptides.

60. The array of claim 58, wherein B3GALNT2 is encoded by the nucleic acid sequence of SEQ ID NO: 185 or comprises the amino acid sequence of SEQ ID NO: 285.

61. The array of claim 58, wherein C22orf29 is encoded by the nucleic acid sequence of SEQ ID NO: 381 or comprises the amino acid sequence of SEQ ID NO: 382.

62. The array of claim 58, wherein CCL16 is encoded by the nucleic acid sequence of SEQ ID NO: 187 or comprises the amino acid sequence of SEQ ID NO: 287.

63. The array of claim 58, wherein DCBLD1 is encoded by the nucleic acid sequence of SEQ ID NO: 291 or comprises the amino acid sequence of SEQ ID NO: 291.

64. The array of claim 58, wherein DHX9 is encoded by the nucleic acid sequence of SEQ ID NO: 188 or comprises the amino acid sequence of SEQ ID NO: 288.

65. The array of claim 58, wherein OTUD5 is encoded by the nucleic acid sequence of SEQ ID NO: 193 or comprises the amino acid sequence of SEQ ID NO: 293.

66. The array of claim 58, wherein RBBP6 is encoded by the nucleic acid sequence of SEQ ID NO: 184 or comprises the amino acid sequence of SEQ ID NO: 284.

67. The array of claim 58, wherein SEPT11 is encoded by the nucleic acid sequence of SEQ ID NO: 192 or comprises the amino acid sequence of SEQ ID NO: 292.

68. The array of claim 58, wherein SLC25A36 is encoded by the nucleic acid sequence of SEQ ID NO: 190 or comprises the amino acid sequence of SEQ ID NO: 290.

69. The array of claim 58, wherein TACSTD2 is encoded by the nucleic acid sequence of SEQ ID NO: 383 or comprises the amino acid sequence of SEQ ID NO: 384.
